United States Patent Application Publication US 2022/0008368 A1 - sequence listing, part 4

SEQ ID NO: 2 - DNA, 58617616 bp, Homo sapiens (residues 6,513,070-8,684,092 of 58,617,616)
  modified_base (1)..(60000): a, c, t, g, unknown or other
  modified_base (24448981)..(24498980): a, c, t, g, unknown or other
  modified_base (24552653)..(24552752): a, c, t, g, unknown or other
  modified_base (24891257)..(24891356): a, c, t, g, unknown or other
  modified_base (24895791)..(24895890): a, c, t, g, unknown or other
  modified_base (24898314)..(24904771): a, c, t, g, unknown or other
  modified_base (24908590)..(24908689): a, c, t, g, unknown or other
  modified_base (27190875)..(27240874): a, c, t, g, unknown or other
  modified_base (58607617)..(58617616): a, c, t, g, unknown or other
ggagctggcagtgagcccagatggcaccactgcactccagcctgggtgatagagagagattccgtctcaaaaaaaaaaaaaaaaaaagacacacacacacacacacacacacacacacacacacacacacacacacaatgagatacacacagatacatagccctagaatcagaccccaggacagacatagccagactattttcatttttttatttttttagtatttattgatcatttttgggtgtttctcggagagggggatttggcagggtcataggacaatagtggagggaaggtcagcagataaacatgtgaacaaaggtctctggttttcctaggcagaggaccctgcggccttccgcagtgtttgtgtccctgggtatttgagattagggagtggtgacgactcttaaggagcatgctgccttcaagcatctgtttaacaaagcacatcttgcaccgcccttaatccatttaaccctgagtggacacagcacatgtttcagagagcacggggttgggggtaaggttatagattaacagcatcccaaggcagaaaaatttttcttagtacagaacaaaatggagtctcctaagacatagccagactattatacatggttataaacacaacacacgtcgggcgtggtggctcacgactgtaatcccagcactttgggaggccaaggtgagtggatcacctgaggtcaggagttcgagaccagcctggccaacatggtgaaaccctgtctctactaaaaatacaaaaattagccgggggtggtggtgtgcgcctgtgatcccagctactcgggaggcggaggcaggagaatcacttaaacccaggaagcggaggttgcagtgagccaagattgtgccattgcactccagcctgggtgacagagcaagactctgtctccataaaaaaccccaaaaaacaaaaaacacaatacagacttgggtacacacatactacatacatgcaatcaaacatacacagagatatgcaatgtatctgcacagccctacagacagacctggagacacaactcaaaaaaaaaaaaaaaaaaaaaagccagcgcacagacccagggagctgacaacacacgggcatacacgctgggtgctttggacacaaaagccacaccgtagggagttttttctctcattcactcaaacacacattgacccagacgcccccacacaaggacacacacggatggacatacacacgaccgcagtccacaagccagggcagactgccatcccccaagtccagcgaccctcagataaagacagacaagcagactgaccccaacatagtcccttgaatttcaggctgggggtgctcaaggctggtatggaggggctcacccagcatcagatagaaaaagtcagaagcatccaacattttttttttgagacagagtctcgctctgttgcccaggctggaatgcagtggcaccatctcggctcactgcaacctccacctcctgcgttcaagcaattctcctgcctccagagtagttgggattacaggtgctggccaccatgcctgactaattttttcacatttttagtacagacgaggttttaccatgttggccaggctggtctcgaactcctgacctcaggcgatctgcctgcctcagcctcccagaatgctgggattacaggtgtgagccactgcgcccggccttttttctttttttttttgagatggattttcacttttgctgcccaggctggtgtacaatggcgtgatcttggctcactgcaacctctgcctcccgggttcaagcgattcttctgcctcagcctcctgagtagctgggattacaggcatgtgccaccacggccagctaacttttttgtagttctagtagagacagttttcaccacgttagccaggctggtctggaactcctgacctcaggtgatccacccgcctcggcctccaaaagtgcttggattacaggcgtgagccactgtgtccagccgcatccaacatcttggtggtgccggagttctggtgacagtggagtggctggggggcatcctgtgccagtccccaggccactggtgctgagaaaggattcctgctggggtggggccatcaccccacgtggtgaccttttccacgtcaggggagcagagggctttgggatgggttcacccactcagaccaggcctcatggaggaagggtggggtggagaaaccaaggcctccgtagctcctgttagtgatttaagacacagcccccaccccacaccaggggcgtggcaggtctggggtggggtcttggtggatgtacatgcggattatgggtgagggcagagcctgcatgtttggagggcagaacgaatggggcaaggcctaaaggaatcaaagggcggctgcaagtcccagcgaaattggtgagggatgagcatggcttgaaaacctggagtgggaagagggtgcaggactccggaagggcagaacccagaaaaggggctaggggttgagacaggacaaaccctcaaagggggagaggtgccgagcctgaggagagggtggtatggactaagaaaagcagaaaagtgccaggcgcggtggctcacacctgtaatcccacaactttgggaggccaaggtgagtgaatcacctgaggtcaggagttcgagaccagcctgaccaacatggtgaaaccctgtccttactaataatacaataaaaaaaaaaaattagacgggcgtggtggtgcatgtctgtaatcccagctactcgggagcctgaggcaggaggatcacttgaacccgggagtcggaggttgcagtgagccgagatcgcaccattgcactgcagcctggacgacaagagcaaaactccgtctccaaaaaaaaaaaaaaaaaaaaaagcagaaaacagagtggggcacgaagagtctccaggccctattcccaggtcactaatgattgggaaatgggcggggcctgggagaatgacagggaggtgtgagggactgaggagtgggcagggtctgggaggctgataacaggggaagtgggcggggcctggagataatattgggaggaactgtggcgtgggaagggcctggagcggacagcaggggaagtgggcggggcctggggagaatgacagggaagtgggagggactaaggagttagcaagggctgggagacaaataactatgaagtgggcggagtctagggagaatgaccgtggggtaggggaactgaggagtgggctgggcctgggagtctgctggggaagcggacggtcctcgagagaatgacaggaaagtgggaaggactgaggagtgggcagagcctgagaggcaaacggatgggtacgagggcggggcctggggagaagctagggaggtgggaggcggatgacagcggaatggggcttcggtagactgacaggatcagtcgtggaaggggcgggcccatctttctcttgaacccgcgagccaaagccacgttggtgctggtgatcatccaggctgagcgctgggcattcccagtctcgggcgatttcttggcgttacttccaggctgagagccatgactaggcgagcttcggccgtgggaccgaagacctcccaccctcagcactctaacctccccgaccctgccctcgctgtgcctcgttgggaatccgcctccggggtcttccgcggtccaggagccgcacctgccgggtggagacgcggggctggctggggtgcgggagtaggaggtcttcggtccaaccgcctccaacccattcctgcttccgacgttctgttcccgcgcttaatgccctgcccgatccagttccggcctcccatctccccttcccgcgtctccacgctctttccttccccggttctgccgtgaatgctcccaagtcctagagcaccggaactccccgcgcgccttggctcctgggccccagctccgtgcagtcctggactggggctccaggtccaccagggggcgcccgctgcccaagctgggtatcgctgcggagaaaaggggcccagagtgattgttcctcaggggagggagggggaggtccccagagggaagggcctgagtttcctcttgggggatggatcctaggtggtctgaggggtgagtcctgggttccctggcgggagtggatcttgggtggtcctctgtgggtacagggtggaacttgggtgttctgaggggtagtccctggggactcctctgggagcggggcagaccttggatggtcgtaggattggacctggacctctgtgtgtgtgattgtgcatgcccataacgtgtgttcttgcgttatgtctatgactagccatggtgcctgccatgtatgtgtatctacgattgtgtctttgggtgtctgtctcagtgtgtaaccgtgtacgtgtgtgttgtgtacctccatgtctgttttggtatgtgtgtgatggtgtgtctgtgttggtgtgttctagtctcggtgtgtttggttatatgccctgaatatatgtctcttgtgtccttgtgtgtgtctgttgctagctttttttttttttttgaggcagaatcttactctgtcatccaggctggagtacagcggcgccatcttggctcactgcaacctctgcctcccgggttcaagcgagtctcccatctcagcctccttagtagctgggactacaggcactcaccaccacgcccggctattttttttttttttttttttttgtatttttggtagagacagggtttcaccatgttggccaggttggtctcggactcctgacctcaagtgatctgactgccttggcatcccaaggtgctgggattacaggcgtgagacactgcacccggtctgtggctagctttgatggttgttgtgtatctatgattgtgtgtccaggtgtgtgtgtgtgtgtgtgattgtgtgtatgtctgcatggtgtgtctgtatgtctgtcttgttttgtgtgattgtatatgtccagaatgggtgtgccctttgtgttctggtgtctgtgtgtgtctacttgtgtccctcccccaggggagttggaaagtcctttccaggtagttaccctgctgggattccctttccaaagcgggttgacttcccagcaccgtgagctgcctcttcatgctcttggaaggggtcgctgggtctgccccaagtctgcctgggtcttccccaaccctgactcctccttccactgccctcaacagggaaacaccatttcctgcctttgatgtcactaggtacaaaaagtttccttcctccaagtggctctggccactggtttctttctgcgtgtgtgaaagctggccacgattctgtgcttaatgttaaaacaaaaagaataaaacaaagcaaacaaaacgaacccatggaaaatgcaagcatgcaaaatcatacaccatgaaacatccacatcttctcaccccaataccctcaatttttgcacatctttctgaaatgttttatacaaacctatttctgctctgaaacccaaagcgtgcattctgcacatagcagcctgcaccttgctttcgtttctttttttcctcacttggttattcttttaaaggtttttttttgttcccccgagacagaatctcactctgttgcctaggctggagtgcagtggcatgatgatctcggctcactgcagcctctgcctcctgggttcaagtgattctcctgcctcagcctcctgagtagctgggattacaggcatgcgccaccacacctgactaatttttgtatttttagtcgagatggggtttccccatgttggccaggctggtttcgaactcctgacctcgtgatccacctgcctggacctcccaaagtgcagggattacaggcgtgagccaccatgcccagcctctttttttttttttttttttttgagatggagtctcactctgttgtcaggctggagggcagtggtgtgatctcggctcactgcaacctccacctccccggtttaagcgattctcctgccgcagcctcccgagtagctgggactacaggggcccgacaccacgcccagctaatttttgtatttttagtggagacggggtttcattatgttggccaggatggtctcgatctcttgacttcgtatctgcccgcccccgcctcccaaagtgctgggattacaggtgtgaagcaccgcacccggccgcctagccccctttaaaggttttgtaaaccatctgcccaaaaaagcaattacatagaataatcacgccaaattttcaacctaaagttcaaacaggacagagactcaacctgatgggtaaggcccatttcacactaaaaaccttaatctttgaaagagtagaggaggcaaagtctgagtgccttgttctcttagcccttggagatctctgtcaagagatgactcagacatgtttttaatttttaaaccgattctgtgagtaataacctggcagttttccttctgatgaccaatgcagttattttcatcttcaacaattttgcaccacatattcctgcctgccccttgtttttatttatttatttttgtttttttgtttattttgttttgttttgagactgagtctctctctgtcacccaggctggagtgcagtggcatgatctcagctcactgcaacctctgcctcccgggttcaagcgattctcgtgcctcagccttccgtgtagctgggattacaggcgcccaccaccatgcccagctaatttttgttgtatttttagtagagacaaggtttcaccatgttagccaggctggcatgacccactgcacctggccttttttttttttagacaagtcttgccctgtcacccaggctggagtgcaatggcgtgacctcagctcactgcaacttccaccttccgggtttaagggattctcctgcctcagactcccgagtaactggcattacaggtgtggaccaccacgcctggctaatttttgtatttttagtagagacggggtctcactatattgcccaggctagttttgaactcctgagctcaagtgattcgcccccctcagcctcccaaagtgctgggattacaggtgtgagcccccggccatgccttcctttttgcccaaacaagatcaacccatgtacacagtcacgtggaggcaccacactctcagcccactggcagcaatgatggctggtcctattgagcacctgctgtatgccaggcactattctggctccctgattctggacaacagtcccacaaggtggtcactggtgttagtctcatttcatatacggggaaactgaggcacagagagatggagagatttcaaggtcatgtagccagcagaggcagagctgggatttgaagccaagtgagtcaaatcctatgctctggtgctgctcaactggaaacacatcgatgcccgcatgcatcctcctgagtacacagtatcacatcagagacactcagtcccagagtagcaggatgtgtgcctcaacttcacaaagctcacttgctgtgcacaatcataccttgcaagctgggagtggtggttcctgcctctaatcccagcaccctgggaggctgagacgggaggatctcttgaggaaatgctgtggtcgtttcctcaacttcaggagttccagaccagtctaagcgagaatgtaccttgcaactcttttttttttttttttttttttgagacggagttttgctctgatgcccaggctggagtgcagtggcacaatctcggctcactgcaacctctgcctcgtgggttcaagtgattcacctgcctcagcctcccaagtagctgggatgacaggcgcccgccactgcgcccagctaatttttttgtatttttagtagagacgggggtttcaccatgttggccaggccagtctcgaactcctgacctcaggtgatctgcctgcctaggcctcccaaagtgctgggattacaggcgtgagccaccatgcctggcctgtaccttgcaactcttacacaaaaccccaggtgcacacactcgggtgccagtctgtgttttccagagacctggatgtagcttttccagctactcgactcatttggatgatgtaattcccctctctgtgtctcttttctcctcaacatgtgtaaacactcctttatggctctagatcaatctcaggctgggtgttcatgcctgtaatcccagcatttttgggaggccaaggcaggaggatcacttgagttcaggagttggagaccagcctggggaatatagcgagaccccgtctttaaaaaaaaaaaaaaaaaaaaaaaaaaaaaggcctggtgctgtggctcatgcctgtaatcccagcactttgggaggccgaggcgggaagatcacgaggtcaggagaccagcctggctaacatagtggatccctgtctctactaaaaatacaaaaaattagctgggcgtggtggtgggtgcctgtaatcccagctgcttgggaggctgaggcaggagaatcgtttgaagctgggaggcggaggttgcagcgagttgagatcacgccactgcactccagcccgggcgacagtgcgagactccatctcaaaaaaaaaaaaaaaaaaaaaaaaatagcagggtatggtagtgtgcacctgtagtcccagctattaatacatgggaggctggggcaggaggattggttgagcccaggagttccagaccagcctgggcaacatagtgagaccccatctctacaagaaataataataagaataataaaatagctgagtgtggtggcacgtgcctgtagtcccagctactcaggagactgaggtgggaggatcacttgagcctgggagttcaaggctgcagtgagtcatgattatgccactgtactccagcctggccaatagagcgagaccgtgtctcaaaaaacaataagatgcacttcactccacactttcctttcctcttttcttcagttccatctggcccctagctcactccgtagctgtctgactcatgcaaattgctccgctcacaccactaatgctctgttaggcttcactctgccctggggtagatagaggacccaggccaggtaaaagttaaccctcgaagaggtcactggctacatgatgggagacacactacaaggaccctgagaggagaagattgttgctgggaaacaatcaaggtggacttcctgggggaggagtctgttcactcaacctcagaggcagaagaaggagggcccccctggcacagcctggggtgctgtcccttccaactacttcctgtgcaatccctccctcaaggcctgtgatggtgagggtggagagtgaggcccttccccagtgggtgaggaaaaccagggcccacgcttacttcgaggagacagctgagcacagaggtgtgactccagcaaacgtgaggtgctaagagggtgacgttgagtgctccacggtgggcggggccgcctggctcagatgtcccgaccacagtgcgtcacggcgctccctgactgcggcctgagtcttccccaggcgttgaggtcttgtttcccttccctggggggcatgttcagagctccgccaagccccccagcacagataggagttcagaccagtcacagtgagaccttggccaagagacctcactttctggagttttaatttctgtgcccacgttttagggatgatgttgtaccacagagctgtagagaaacgtcagtgaccatcacaatgacaggttgcctttattgaacatttactatgtgctcggcacggtgctcagagcaagctttccactattctttgagatccactatgattcccatttaacacatctgaacaatgagctgaatcagagaagtgaagcagcttgcccaagatcacacagcaaaaactcccactctttctctctcttttttttttcttttttttttttgagacagagtcttgctctgttgtccaggctggagtgcagtggcacaatccccactcactgcaacctctgcctcccgcattcaagcgattctcctgcctcagccccccaagtaactgggattacaggcatgtgccaccatgcccaactaattttttgtatttttagtagagacgggatttcaccatgttaatcaggctggtctcgaactcccgatctcaggtgatccacctgcctcagcctcccaaagtgctgggattacaggcatgagccaccatgcccagcctgtctttctttttttatttttgtttttattttaaagacaaggtcttgctcttttttgcccaggctggagtgcagtggtatgaccacagctcactggaacctctgcctccccaggtcaagcgatcctcccacctcagcctctctgagtagctgggaccacaggtgtgtgccatgacacctggctaattacttttctttttttttttttgagatggagtcttgctctgttgcccaggctggagtgcagtggcgtgatcttggctcaccacaacctctgcctcccgggttcaggagattctcctgccttagtccgccaagtagctgggactacaggtgtgtgccaccatgcctggctgatttttgtgtttttagtagagatggggtttcagtatgttggcccggccttgttttttttttcttgtagagatgggatcttgctatactgcccaggctggtcttgaactcctgggttcaagcgatcctcctaccttggattcccaaagtgttcggattacaggcatgagccactgtgcccatcccacacagccagaactctgaagagctggaattgaagactccacaggcagcaaacatttttctgaaaaggaccagacagtaaatattttgggctttgtgagctagtcagtcccttttcacaactcttcaactccaccatagtgtcaggaaagccaccatagacaatacggaatgaagggaggatcacttgagcctgggagttcgaatgaatgaaggccaggtgcggtggctcaggcctgtaatcccagcactttgggaggccaaagaggtggatcaggaggtcaggagatcaaaaccggcctggccaagacggtgtaaaccctgtctctactaaaaacataaaaattaggcatggatgcgggtgcctgtaatgccagctactcaggaggctaaggcagagaattgcttgaacctgggaggcagagttttcagtgagccgagatcatgccatggcactccagcctgggcgacagggcgagactccatctcaaaacaaaaacaaaaacaaaaacaaaaccagaaaagacaatatggaatgaatgagtgtggctgtgtgccaggcacactttatttatggacagtaaatgggaaagtcatatcatttgcacatgtcaggaaatgttatttttcttttgacatttttccagacattcaaaaacaaaaacaattaagtgaaaggatcttcatctacaaggctgtacaaaaactggcagtgggccatatttagcttttggctggagtttgctgatcctggctctagagtgttcttaacctttatgctataattatttctcttttcattttttttttttttttttttgagatagggtctcactctgtcacccagcctggagtgcagtggtgcgatcctagctcactgcagccgcaaccttctggtttcaagtgatcttccaactcagcctcctaagtagctgggactacaggcatgagccaccatgcccagtggcatcaggatctttaaatctttttaaaattaattaagttttttttttttttgagacagagccttgctctgttgcccaggctggcgagcagtggtgtgatctcggctcactgcaacctccgcctcccaggttcaagcgattctcctgcctcagcctcccgagtagctgggattacaggcatgcaccaccacacccatctaatttttgtatttttagtagagacggggtttcaccatgttggccaggctgctctcgaactcctggccttaagtgatcctcctgcctcggcctcccaatgtgtagggattacacgcgtgagccatcacgcccggcctagagtgctcttaacctttatgctatatttctttctcttttcctttttttatttattttatttattttttaaagataggatctcgctctgttgcccaggctggagtgcagtggtacaatcatacctcactgcagccttgacctcctgggctcaagcagtcctcccacctcagcttcttgagtagctgggaatacaggcatgaggcaccatgctcagcgacatcagtatctttaaatctttattcctggcctggtgcagtggctcatgtgtgtaatcccagcattctgggaggctgaggcgggtggatcacttgaggttaggagttcaagaccagcctggccaacatggagaaaccttgtctctactaaaaggaggcagaggttgcagtgagccgagatggtgccactgcactctggcctggatgacggagcaaaactgtctcaagaaaaaaaaaaatctttattcctggttggtcagcttccttggagagcgaccttctacctatgcatcttctggatcctggatgtggagggagtagaggcaagcgctgagggcatgtgtgtgtcttaatttcaacattcacattccaggttcaatgaacactcctgtttcccactacctgccatttttttttctctttccagaaaccctgccattttcctttctctctctttttttttttttttttttttgctttttttttgagatggagtttcactcttgtcgcccaggttggagtgcaaaggtgcgatcttggctcactgcaacctctgcctcccgggttcaagcaattctcctgcctcagcctcctgagtagctgggattacaggtatgtgccaccatgctggctaacttttttttgtatttttagtagaggcggggtttcaccatgttggccaggctggtcttgaactcctaacctcaggtgattcactcacctccgcctcccaaagtgctgggatgacaggtgtgagccaccgcgcccagcccgttttcctttctgctttttttttttttttttttttttggaaacggagtcttgctctgtcgccaggctggagtgcagtggggtgatctcggcttactgcaatctccgcctcctgggttccagcgattctcctgcttcagcctcccgagtggctgggactacagtgcgcaccaccacgcccatgtaattttttgtatttttagtagagacgggtttcaccatgttggccaggatggtctcgatctcttgaccttgtgatccacctgccttggcctcccaaagtgctgggattacaggtttgagccaccgccccggccattcctttctcttaagggaaaaaaaaaaaaaaaaaaaaaaggctgcacgccgtggctcacacctgtaatcccagtactttcggaggccagggcaggaggacccattcagcccaggagttagagaccagccagggcaacatggagagactccgtctcaattaacatataaaataaaatatcctgtgtgcattcacttaggaaaaaatgcaataaaataaaataaaaaataagaatgaaaaaggacctggcgactcagcagcccaccgaggtagctcacgcctataatcccagcactttgtgaggtcgagatgagcggatcacttgagccaaggaggtggactgggcaatatggtgaaaccccatctcttcaaataatactaaattagctgagcattgtggtgcgcacctatagtcctagctactggggaagctgaggtgagaggattgcttgagcctggcggttgaggttgctgtaagctgtcattacccactgcactccagcctcggtgacagtgtgaaatcctgcctcaaaaaaataaaaattacttagaaagggccaggtgaggtggctcatacctgtagtcccagcactttggggagtctgaggtgggagagtcacttaagcccaggagtttgaggttgcaatgaaccacgatgacaccactgcactccagcctgggcaacagagtgagatgctgtctattttttttttttttgagacggagtcttgctctgtcacccaggctggagtgcagtggtacaatcttggctcactgtgacctccacctcccagattcaagtgatcctcccgcctcagcctcccaagtagctggaactacaagctagtgccaccatgcccagctaatttttgtagtttttttttttttagtagagacagggcttcaccatgttgcccaggctggttttgaactcctgaacttaagtgatccacccgcctcagcctcccaaagtgctgggattacagacgtgagccaccatgctgggctgagaacctatcttaaaacaaaaaattgcttctctgattctctcttatggaaagtggagaggagttggtgtcccttctgcaatttttttttttttttgagatagagtctcactttgtcacccaggctggagtgcagtggcacgatctcggctcactgcaacctccgcctcccgggttcaaggattctcttgcctcaacctcccgagtaactgggattataggcatctgccatcacgcctggctaattttagtatttttagtagagatggggttcaccatgttagtcaggctggtcttgaactcctgacctcaggtgatccacctgcctcagcctcccagagtgctgggattacaggcgtgagccactgcgcccggccttcttctgcaaatttatctatggcaaacttctgtattttagccgccatccaccacattattcatagttgaggggattcaccaacgagtaggtcttaggggtggtggaaatctaaggaaactcacctttccgttctgctggcttgtaattttttttttttggtttacgaacaattgctcaagtgtgactacagtgaagtttcaggagacagtgaaaacagaggctggttcagtttgtcatcttgacccggaagggatggtgtaaagggagacatgagtggtgagaaagtgtctggcagttgcggttctggggaaagaatgttccaggccgaggaatagcagatgcgaaggaaaaacgtgggcacaagtggcattctcaaacttgcggggccgtcggaatcttctggaggacaccccctctgagagtttccggaggtttaggcggggtgctagaatttgcatagctaattgatagtggccctgttgctgggtcgggcctcacacgtggagtacccaaaccgtatataggaagtgtttagcatttggtaatgctccttcaacactagccagtaacattactgttttctctgcaatcccccagggaggcccaatacaggatcagacacagtgctgacctggaagatacttgttctgttgaatgagaagtctaccttatgactgggcacggtaacgcatgactggcatcacagtgctgagaggccaagacaggagcattgcttgagtccaggagtttgagaccagctgagcaacatagcaagaccctgtctctataaaaagtaaaaaattaaaaaaaaaaattggtaggcatggtggtatgtgcctgtagttccagctattcaggagtctaagacaggaggatggcttgaacccaggattggaggctgcagtgggctatgatcgtgccactgcactccagcttgggcgacagagcaagaccttgtatctgaaagcaaaacaaaagtccctttattttatgggctgttgacttctgctagcagagggatgaaaggcgtggtctaccctcccatctcccatggggctgggagatgggaagggagttggccattgtggacccacactggtctgggcagaccaggacttcaacaccagccaagggctttccccgggtcacgtccctctccatctgggagtgcttcctcttttggggccaagttttcaccgcttcttggcccatcctcccagccccggattggccgcctccagcaggccagagcagatgggaaatgtgtttcctccaactcgctcaacactgtccctttcttgcaaggggaatttctccacctggactctccgagcttctgcttgtagggtcccgaggggctcctgccgggaaccatccagtgggtgggtgggggcaggccagggaaggcccaggggtcccggggaaggtggccaggagggctgagcatgacactcagggttccactggggggttggggatcagggggcagatgctccaggagtgagggtggttgaggcttggctgaagcctgacccttcttaggaagtgctggatgtgggggaacccgggggagtcctagtgatggggggctagggggtgctgagaggaggggaaggagacaaagagagactaaagaaggaaaaggagagagacagggagagacagagagtcagagagagacagagggaatcagagacagagagaaacagggagagagacagaaagagtgagagccagagacatacagagacagggagagacacagagatgcataaagagagggagtcagagatggagagagacagagataacggagccagagatagggagagtcagagacagagagaaagaaacacacagactgacacagataaaagagccagagacagggagaggcagagacaaagagagatacagagacagagataacagagccagagacagagagacagagacagagataacagagccagagacagggagagagtgtcagagacagagacagacacagagataacagagccagagatagggagagtcagagacagagagaaagagacacaagacagacatagataaaagagccagagacagggagaggcagagacaaagagagatacagagacagagatagcagagccagagacagggagagagtgtcagagacagagagacagacacagagataacagagccagagatagggagagtcagagacagagagaaagagacagacagacatagataaaagagccagagacagggagagagacacagagacagagacatagagacagagataacagagccagagacagagtcagagacagagacagagagagccagacacagagacagagagagagagtcacagccagagacagcgacagagataacagaagcagagagagggagaaagataacagagccagagacagtcagagacagagatagagagacagagataacagagccagagacagatacagagacagagataacggagccagagatagggagagagagtcagagacagagagagatatatagacagagataacagagccagacatggggagagagagtcagaggcagagagagagaagacagatagagagacagagccagtgataacagagccagagacagggagagagagtcagagagagatacaatgagagacagagataacagccagagacagagttagacagagagatacagagacagagataacagagccagagacagggagagagaattagagacagagatagagagagacagagacagagataatacaggcacagaggcacgcatagacataaattggcagagagagagaaagatctctttccacccactgcagaggcaatcaacagagacagagaaagacgttaacggggagacacagagagcaaaggagactgagtcagcaagagacccacagagataccgggaaagagcggcagagagggagaaccagggcgatggagagacagcagggagaaaggaacctggagccgagcttggaaggccggaaacggaaaggagagcgaaaagcggagagagatccgagtggagaaaattccgcagagtcacggggacgaggggaaaggctctgggctgggaaggggcgtggccgcgggcggaggggcgtggccgcgggcggaggggcgtggcctccttttgtagccaagcagctataaaaagcggcgcgctgtgtcttcccgcagtctctcgtcatggaatacgcctctgacgcttcactggaccccgaagccccgtggcctcccgcgccccgcgctcgcgcctgccgcgtactgccttgggccctggtcgcggggctgctgctgctgctgctgctcgctgccgcctgcgccgtcttcctcgcctgcccctgggccgtgtccggggctcgcgcctcgcccggctccgcggccagcccgagactccgcgagggtcccgagctttcgcccgacgatcccgccggcctcttggacctgcggcaggtgagacgtgccccgaccctcggtagctggtctcgcgggagacccctaccgcccctctgggactcccttctccctcccgcacccccagggacacctgttctacactcccggccggggagaggagacccaccggggctcccattctccatctagcaccgaggccgggggggcacacctttcatcccgcacccctacgacacctcatctgtaccccaggccgggggcggggaggagaccgcccaacagttctttttggaccccccaagggtctccttcttctagtccggggggcacccctttcatcctgcgcccgctacgagaccctatctgtatcccgggagggggagaggagacccccacaagttctttttggacctccaagggctctccttctccgtcttgcacgggagggcacccctttcattccgcatcccgagaccccatcagcaccccaggccaggaggaggagacccccacagtcctcaacccctcagggatacgtcttctgcaccccgggtcggagaaaggctggcttccctccatgtggcagtgggtgggggcacccctcttcattccgcattcccaaggcaccccatctgcaccctggacgggggaccctccgcggttctccaaccctcgacggcttcctttctctatgtaggacttaggacattgagggcacctctttttaccccgcacccccacaagctctgcatctctggggggaaccttttttccatccccgatccgaggggggcacttcctctttatctgggaccgccaaggagacccccagttcctttgctaactcccaaagagccttatccccaacatctgaggtacccctctccctttcaagacccccaggggaatacccccaagggggctggaaagaagagggatcgcttttccctcctgaattcttggagatctgtccttggggcaggttgagccaccagcttcgtgtgtgtgtgtgtgtgtgtgtgtgtgtgtgttcgtgtttgtgtgggtgtttgtgttcgtgtgtgtgtgttcgtgtgggggtgcgtatgtgtgtgtgttcgtgggtgtgtttgtgttcgtgtgggtgtgtgttcgtgtgggtgtttgtgtttgttcgttcgtgtgggtgtttgtgttcatgtgggtgtgtttggatatttgtgttcgtgtgtgtctgtgtgtgttcgtgtgggtgtttgtgtgtgtttgtgtttgcgttcgtgtgtgtgttcgtgtttgttcgtgtgtctgtgtgttaatgtgggtgttcgtgtgtgtgttcgtttgtgtttgtgttcgtgtgtttgtgtgtttgtgtgtgtgtgtgtgcggtctctgttctttagttgggagggaagggaagcgtaggcttcaggtcggcacagactctggggaccctgacagctgaagtgagtggggacagaacctccattttctaggggaacccccatccactttcctcctttctacttttaacagggcatgtttgcgcagctggtggcccaaaatggtaagtatcctccgccacttccggtccctggccccccaccatccccaccccgggatacgaagaagggggaacctggagagtgaggctctgccgcacactggctttgacccttgaccgctgctgtctctgaaagctgctacttcccctctttgaacgccaccgatccctctttctgacttgctctgactctctggatgccatggcctccccatcagacccccatctgggcccacctgggacccctgccctctcagagctggggcttgacacccccaacccccagcctggttttgtgtctctggcctccttcttttcgaaaccctcttccccgctgcttttcttccctctttcctgccccttccccactctcccagcctctcttccctacctcttcccctcgcccagagcctcctccttactcccattctcttccccatccccaggccctcctcctgtccccttccctccccctagaccctcctccctgccccttccccaaaccctccccagccccatgctctcccagtttccaagacactcctcccagcaccttccctccccgtccagagacttcttccccgctcgagacctcttcccccttcccctcccagagacccccttcccccttcccctctccatctagagatcacttccccctttcccctccccctccagaaaccccttcccccttccctctcccctccagagaccccttccccctccaaagaccccttcccccttccttccccctccagagacccctttccccttccctccccttccagagaccccttccccctccccctccaaagaccccttcctccttcccctccctctccagagaccccttcccccttccctctccctccagagaccccttcccccttccctgccccctccagagtccccttcccctccagaggccccttcccccttccccctccccctccagagacaccttctcccttctccccctccagagaccccttcccccttccctccccctgcctaagactcccctccctgccatcttctctccttggtgcttccttctccctaacccctcccccaccccttcctgctccctttgcctttcttcgaagtcctctcttaccaggtcccctgtccacccctcttaaagttcccttgattccctgatggatccttcctctagaacttcctcctttcctaacagtcttccctctccctcctagctccctgtccacctctcctctcccctttccttccttctctcccttctcctccccccatctccatcctgtccgagatctgctgctccctccaaccccctcaccgccctctccaggagtccccttacccctccccgaggcctcttccagccagactcgcctggccttttgcttttcaccccctcttcctcttcctgcatgtctttccccgcacccgcatcactccttccccacccaacctcttggagttttgccctgtcccgactcttgtccttctccctggattcccttcctctgttctatccccgtctttccctcccctagctctacccctgctcagagtcccgcccccaacaacctcagttctcttcaatcagcacccccccaacgccccccccacccaggctccccgctctgctcccctgtcccgctccctgccccgccattccccgccccccggcccctgacccgttcttttctcccagggctgcgctgacatgttcggtgctcagccacgctcagctgtgctgggacatgctcagctaagctaagtgcatgctttcctcccacagttctgctgatcgatgggcccctgagctggtacagtgacccaggcctggcaggcgtgtccctgacggggggcctgagctacaaagaggacacgaaggagctggtggtggccaaggctggagtctactatgtcttctttcaactagagctgcggcgcgtggtggccggcgagggctcaggctccgtttcacttgcgctgcacctgcagccactgcgctctgctgctggggccgccgccctggctttgaccgtggacctgccacccgcctcctccgaggctcggaactcggccttcggtttccagggccgcttgctgcacctgagtgccggccagcgcctgggcgtccatcttcacactgaggccagggcacgccatgcctggcagcttacccagggcgccacagtcttgggactcttccgggtgacccccgaaatcccagccggactcccttcaccgaggtcggaataacgtccagcctgggtgcagcccacctggacagagtccgaatcctactccatccttcatggagacccctggtgctgggtccctgctgctttctctacctcaaggggcttggcaggggtccctgctgctgacctccccttgaggaccctcctcacccactccttccccaagttggaccttgatatttattctgagcctgagctcagataatatattatatatattatatatatatatatatttctatttaaagaggatcctgagtttgtgaatggacttttttagaggagttgttttgggggggggggggtcttcgacattgccgaggctggtcttgaactcctggacttagacgatcctcctgcctcagcctcccaagcaactgggattcatcctttctattaattcattgtacttatttgcttatttgtgtgtattgagcatctgtaatgtgccagcattgtgcccaggctagggggctatagaaacatctagaaatagactgaaagaaaatctgagttatggtaatacgtgaggaatttaaagactcatccccagcctccacctcctgtgtgatacttgggggctagcttttttctttctttcttttttttgagatggtcttgttctgtcaaccaggctagaatgcagcggtgcaatcatgagtcaatgcagcctccagcctcgacctcccgaggctcaggtgatcctcccatctcagcctctcgagtagctgggaccacagttgtgtgccaccacacttggctaactttttaatttttttgcggagacggtattgctatgttgccaaggttgtttacatgccagtacaatttataataaacactcatttttcctccctctggagagttggttgttaaattaccagcacacgctgtccgtctctgctctacagagctggccagtttcttcagccccatagtttccccaccatacagatctttcacggccacccctataactagacacatcctctggctggctaagatagccctgtgattctgcaacccagggcttaacatgtgatttgtggggagaggaggatggttccccccaattctggtccaggagccagtgtcaaatctgattagtcaaatctgattggtcaccgcctgtctggtagcgggttgtttgcctgttttgaataagacccctggcaacaggtgattcaattctctcgtcccagctgattgggtcaggttggacacgtgacttgagctgggccaatcaggtctccccagaaatgtgggtgggctggaccacagaggctagagagtggagaagaggaagttgtgcaaagactcaggtgtgaccacagagttccagagagacaccagagctactttgatttccttcttgcctcttgctggtgacatgggttgccattttaatggcaaaactgcaataacttttgcctcaacctaatagatttctagggctgccataagaaagtaccgtaaagtgggtggcttaaagcaaacgagctttgttctcgctcggttctgcaggccagagtccaaagtcaaggtcttgacagggccatgctcattctaaaggctccagggagaaggccttcgttgcctcctcctaagttctggtggttgccagcaatcctccagtctctgcctctgttggtcacatggctgtgttctttctgtgtgacttcatttctttgtctcttcttcctgtttttttctttgagatggaaggagtctcactctgtcacccaggctggagtgcagtggcgccatctcggctcactgcaacctccacctcccgggttcaatcaattctcctgcctcagtctcccgaatagctgggattacaggcacatgccaccacacccagctaatttttctattttaatagagactgggtttcaccatgttggccaggctggtcttgaacttctcctgacctcaagcgatccacctgccttggcctaccgaagtgctgggattacaagcatgagcctctatgcccggcctcttcttcctttttatgtattgttttttttgtagagacagggtcttgctatgttgcctaggctggtcttgaactccgagcaacgctcctgcctcagactcccaaagtgccaggattacaggtgtaaggcaccaggcccgaactctcccctttttataaggacaccagtcatgctggattcagggcccatcctcttccaatatgacctcatcttaatttaaataattacatctgcaaagaccctatttccaaagaaggtcattaatatagtttggctctgtgtccacacctacttttttctttttttttttgagaaagactctcatcagttgcccaggctggtgtgtagtggcgcagtcttggctcactgcaacctctgcctcttgggtttaagtgattgtcctgcctcagccccctgagtagctgggattacaggtacaggccaccactcttggctattttttttgtatttttagtggagctggggttttgccatgttggccaggctggcctcgaactcctgacctcaagtgatctgcctgccttggcctcccaaagtgatgggattacagacgtgagccaccgtgcctggcccccttggggttctgagctcccctaagctaaaatcaagttgactgaaggattgctttccttctggaggctctagaggataattgctttccttgtttttccaacttctagaggcttgtttttaatttaatttaatttaattttgtaaagacggggtctcctcatgttgcccacgctggtcttgaactcctgacctcaagggatcctcctgtcttggcctcccaaagtgttgggattacaggcgtgagccactgcacctggcaattttatttatttttttgtagagatgaggtcttgctatgttgcctaggctggtctcaaattcctgggcttgagcaatcctccaccatctgtaagaattaaagaaagaggaaagaaacatgaaaggtggcttaacagtcaaggacaggtttattttagagaaaataaacctgagaggggcttctagccgagttaggtcagaggcacactctcttacagactaggagtttttaagcatttattcagggagtttatcagaggcttggactgcttctgtgtttctttctttctttttttttttttcttagttgaagtctcactctgttgcccaggctggagtgtggtggcacaatctcagatcactggaacctctgcctccctggttcaagtaattctcctgcctcagcctacagagtagctgggactacaggcatgtgccaccacgcccagctaatttttgtggtttttttttttttttttttgagacggagtctcgctctgtcacccaggctggagtgcagtggtgtgatctcggctcactgcaagctccgcctcccgggttcatgccattctcctgcctcagcctctggagtagctgggactacaggcgcctgccaccacgcccggctaattttttttgtatttttagtagagacggagtttcactgtgttagccaggatggtctcgatctcctgacctcgtgatctgcctgcctcggcctcccaaagtgctgggataataggcgtgagccaccacgcctgccccacaaagaattacaaataaagctttcactcttcttatgtaaagacctgacaatgcatacaatggtccactgttgatttggaagcagggacagttttctattacagtctgttgattgtattgtataattgttaagggaaaaaaggaaaattatatttctgtttgtttgtttgtttgttttgagatggagtctagctctgtcacccaggttggagtgcagtggtgcgatctcagctcactgcgacctccacctccctggttcacaagcaattctcctgcctcagcctcttgagtggctggggttacagacatgcgccaccacgcccagctaatttttgcatttttagtagagacagggtttcaccatgttggctaggctggtctccaacttctgggctccagtgatccacccacttcagcctcccaaagtgctgggattacaggcgtgagccaccatgtccgcccacccccccggtatttcttattggaactgtttttcttgtttgaggtttcttttccataccctgaatctacaatgacccaaccataaccttgcttctgaggcccgttctctgatgagaaagtttagttccaaatggggaaagtacctgagttccagccttttcagcctgactttgcatctatttagagatagggtcttacaggggtgatcacgttaaaatgaggtcattagggtaagccctgatccaatatgactgatgttcttataaaaggggggctttggctggatgtgataggggggctcctgcctgtaattccagcactttgggaggccaagccaggtggattgcttgagcctagaggcttgagaccagtcatgggcaacatagcaagaccccgtctctacaaaaaatacaaaaatttgctgggtgtggtggtgcatacctgtagtcccagctgctagggaggctgagatgggagatcactagaaccttgaggtcaaggctgcagtgagctgtgattaccactgcaatccgctctgtgtgacacagcaagatcctgtctccaaaagaagtgagggtagggggtggaatttggacacagacacacacagggagagcaccacgtggagaagaaaatggaatccatggtcaggctcggtggttcatgcctgtaatcccagcactttggtggatcactggaggtcaggagtttgagatcagcctggccaacaaagcgaaacctcgtctctactaaaaatacacaagttagccgggtgtggaggcgttcacttgtcatcccagcatcccagctactccgtctcaaaaaaaaaaaaaaaaaaaaaggaaaatgtcatctacaagccaaggagagaggcctggaacagagccttcccttacagccctcagacggaaccacatctgccaatgccttggttttggacttccagcctctagaactgttagacaataaatttctgctgttgaagcccccaatatgagctactttgttataacagccatatcaatttaaaaagagaattaaaggagttgataatttttttttttttttttttttgagatggagtctcactctgtcacccaagcagactgcaatggcacgatctcagctcactgcaacctccgctcccgggctcaagcgattctcccaccttaccctcccgagtaagtagctgggtctacaggcgcatgccaccatgtctggctgatttttctatttttggtagagacagggtttagccatgttggccaggctggtcttgaactcctgacttcaagtgatccacccgcctgggtctctcaaagtgtagggattacaggcgtgagccactgcacccagccaggaattgatactttaatacactttcaatgcacagtgtctggctcctggttagcattcattaaacggtagcaattattaaggacactcaaatggacagaaagaatgttacagaaacacaatggtacaatagaggggttgcggccaggcacagtggctcacacctgtaatcccagcactttgggaggctgaggtgggtggatcacgaggtcaggagttcgagaccagcctggccaatatggtgaaaccccacctctactaaacatagaaaaattagctgggcatggtgacaggcacctgtaatcccagctactcgggaggccgaggcaggagaattgcttgaacctaggaggtggaggttgcagtgagctgagactttgccattgcaccccagcctgggtgacacagcgagactccatgtcaaaaaaaaaaaaaaaaaaaaaggctgattcaaaaagctggcaagcaaggccaataatagagagagtaaaaatactatgagagatagtgaaataagagatagtgaaaatagtatacattgagcaggatgtgttgagagatatgacagacaaggcaacacaaaggtgcattgctcaagcagtgacacacagatttacagatgacatcatacaataacagatgtgggtattagaaagaagcaacagctcacagaagagtggttaccatgacacagctgtgatgttatagagatatcgccaagctgggcatggtggtacatatctgtggctccagctacttgggaggccgaggcgggaggatctcttgagcccaggaggtcgaggctgcagtgagctgtgatcacaccattgtactctagcctgggcgacagagagacaccctgtcttaaaaaaaagaacactcttgccaagaagggagttacaaagtcataatgttataaaagcaattatgcaaggataggatattgtaaacagccacagctttataatatcatagccacgactctaacgttgccaaacagaaagacaaatactacacgatctcacttatatgcggaatctaaaatagtcaaacacatagaagcagagaatagagcggtgcttgccaggggctgtgggtggggaaaacgaaaggtgttggtcaaaggataccaacattcagttaagaaagatgaggccgagcgcagtggctcatgcctgtaatcccagcactttgggaggctgaggcggatggatcacccgagatcgggagtttgagaccagcctgaccgacatggagaaacctcatctctactaaaaagagaaaattagccgggcgtggtgctgcatgcctgtaatcccacccactcgggaggctgaggcaggagaatcacttgaactcaggaggcggaggttgcagtgagcggagatcacatcattgcacaccagcctgggcaccaagagcaaaactccatctgaaaaaagaaagaaagaaagaaagatgggctgggcgtggtggctcacgcctgtaatcccagcactttgggaggccgaggcgggtggatcatttgaggtcaggagttcaagaccagcttggctaacatggtgagaccccatctctactaaaaatacaaaaatgagccaggcgtggtggcgagtgcctgtaatcccagctacccaggaggctgaggtaggagagtcgcttgaaccttggaggtggaggttgcagtgggtcgagattacactactgcactccagcctgggagacagaacgtgactctgtctcaaaaaaaaaaaaaaaaggtgtttttattggattaataaggaacccccttcttcttcctctttttttttttaattttgagatagggtctctctctgtcactcaggctggagtgcagtggggtgatctcggctcactgcaacctctgcctcctgagttcaagtgattctcttacctcagcctcaatagtagctgggactacaggtgcacaccacatgccaggctaatttttatagtttttggtagagatgtggtttcaccatgttggccatgctggtttggaactcctaacctcaagtgatccactcgccttggcctcccatagtgctgggattacaggtgtgagccaccatgccctgccaagaacccccttcttctaccagacagaagccaaggtgcactgacttgggagcagattatgggctagatttgagccttcactcacatctgtagcccagggactaaatatatgtttatatataaatatgattgggtgtgatggctcatgcctgcaatcccagcacgttgggaggccaaggcaggaggatcacttgagcgcaggagttcaggactggcctgtgctacgtagggagaccctgtctctgcaaaaaattagctgggtgcaacggtgtgcacctgtagtcccagctacttgggaggctgaggcgggaggatcgcatgaggccaggagtttgaggctgcagtgagccatgattgcactactgcactccattctaggtgacagaaccagactctctctttctctcatcagatatatatatatatatatatatcagaggctaggaagaggggagaggggatgaggaaaaataaagaatacaaatgtatttattatcattgaactgaacccttaataatggaaaaaatggtaaatcatatatgcacattttacatatataatttaacattatatctatatataattcacatacatagtatattcatatacctaaagctggaaaaaatgctaatctcgcaagcagaaaattgactttgtcataactcctttggcagctgaacttgactgtgcccatgtaattgtattgatgatctttattcattgtataacctgcgatgaaacagggatgtttacatgagtcaagtatgcttgattatgagggggtgttccaggagcccccagagggggtaatccatgctacacatatcatactacctttctacattctaatttttttttttttttgagacagagtcttgctctgttgcccaggctggagtgcaatggtgcgatctcagctcactgcaacctccgcctcccgggttcaagagattctcctgcctcagcctcctgagtagctgggattataggcatccaccaccacgcccggctaatttttttttttttaatctttagtagagagagagtttcaccatgttggccaggctggtctcgaactcctgacctcgtgatctgcccgcctcggcctcccaaagtgctgggattacaggcgtgagccaccgcgcctggcctctaaattctagatctccaaatctggcttctagggtttgggatcagggaatgaggatttgtccaaaggcatggggtgggaaaaaagactgtttgtttacaagaggtaagatgtcaggaagcagcaatgtgcttacaccactgaggtaggtgtgcccctttcaggggggagtttccattctggggatccccattctgaggtttcccagaaggggacagttttcaagcccactttcctgacggttgcatcttgtcgcaggtttcatctcacctttgtcttgctgcccgcaatctctggcttggtcagctcaggaaacccctggtgccagagatccggatgaagatgagggactagttcggcctgttgcggtatctcagcggggtgagacgcctcggtggggaaggcagagtggaaaacccgacgccttccaccagcaactcttgtgaatatgtgtgtgttggggttatgtggctagccaggagtggagatggatagtgtggtctgcagaggatgcattttggagctgacagagctgagtttgagccctggttctgccagtgctggctaggctgtgcacccctgggcaagggtcttcacctctctgggctcatgtcttcagttataaaactggaaaataattctcatgggctcttgggagatttatttatttatttatttacagacgaattctcgctcttatcccccaggctggagtgcagtggtgcgatctcagctcactgcaacctccgcctcccaggttcaagcgattctcttgcctcagcctcccgagtagctgggattacaggcgcctgccaccacgcccggctaatttttgtgtttgtagtaaaggtgtgtttcaccatgttggccaggctggtctcgaactcctgacctcaggtgatctgcctgccatggcctcccaaattgctgggattacaggcatgaaacactgtgtccagtgctcttgggagttttaaatgagctaacagtttcaattgcacagtggctgacattggatttcatatgtgaaatctgttgttattattattaacattattattattattttttgaaacatagtttgtgatgttgctcaggctggagtgcggtggtgcgatcttggcttactgcaagctccgtctcccgggttcaagcgattctcctgcttcaccctcccaggtagctgggattacaggtgtgagccacctcacctggctcatttttgtatttttagcagtgacagggtttcaccctgttggccaggctggtctcgaactcctgacctcaggtgacctgcccgtcttggcctcccaaagttttgggattacaagcgtgagccactgtacccgacctgtttttgttttttttttttaaattttattttgagatggagtctcgctctgttgcccaggttgtagcacagtctcgctctgttgcccaggttgtagcagtggcgtgatctcggctcactgcaacctctgcctcctgggttcaagcaattctcctgcctcagcctcccgagtagctgggattacaggcacctgccaccacgctaatttttgtatttttagtagacatggcgtttcaccatgttggccaggctggtttcgaactcctgacctcaagtgatccacctgccccggcctcccaaagtgctgggatgacaggtgtgagtcactgagcccacctcaaactttgtttttcctctgctctaacaccaccaccaccaccgcaatcatcaatacagaagacttctgtgaccaaatgtgtggggtttttttccccacacacctagcagcggacaccagctgggtgtttcggggtgtcttccaattcaattccgacatcatctacgtggagatggtgtcagattgcacaggctgggggcttagtccccaggagtgacgcccacgcccctagataccagttgcaagtctgggcctttggaaggttttttatttatttatttatttattttttagatggagtcttgctctgtcaccaggctggaaagcagtggcacgatctcagctcactgcaacctctgcctcccaggttcaaacaattctcctgcctcagcctcccgagtagctgggactacaggtgcgcaccaccatgcccagctaatttttgtattttcagtagagatggggtttcaccatgtcggccaggctggtctcgatctcttgacctcatgatctgcccgcctcagcttcccaaagtgctgggattacaggtgtgcgccaccatgcccggctaatttttgtattttttagtagagatggggtttcatcacattggtcaggctggtcttgaacttctgacctcgtgatctgccggccctggcctcccaaagtgctgggatgacaggcttgagccactgtgcccagcctggagcttttgactgattggcttcaagttggggttcccacgaccccttgtttgagttggatcaatttactggggtggctcacagaactcagggaaatatttatgttcactgatttattataagtgatgttactagggatacagacgaagacatgcatggggtgaggtatgggggacgtggggtggatctttcatgccctccctggatgcaccgtcctctgggatcctcctgtattcagttaactggaagctccctgaacccagtcttttggcatttccatggagacttcattacataggcatgattgattaaaccattggccattggtgatcaacttgaccttcagcccctctctcctcctcctgaaggttgggggctggggctgaaagtctcaaccctctaatcctgccttggtctttctggtgaccagcctcaccttgaacccatcagacaaaagatatacaaaagacagcactttgaagatgccaaggattttagtagttctaagccaggaacagtggacgaaagcctgtatatataataatgccgcaaacagggtagacggtggaggcatttatggacttggggaacctggaggatcatagatcactttgaattgtgcgggatttccagatgtcgctgagggactttgaccgggatggccaagggggagtgttgaatcctttctgtagctatgcaagctctttgcctggaatgcacatttgagagttgttggtatattttatataatgcaagttttgggggcaggatgaatctcttacgcagacaaataaaggtgtagaagagaggaaggtctaagctcaagtgccaagaaactctgatacataacagaaggcatatgtatatgtattagagatgggtttcaccatgtgccaagaaactctgatatataacagaaagcctatatatgtatatatatatgagattgggtttcactgtatgtgtgtgtgtgtgtgtgtatatatgtatgcagtgtctggaagtcaggtgttcagcatatttggagatttggaggggtgaccagacaggaaagaaaaaaaataagtttcgagaaatgtgtttgaagaagtaagtggtggtcagtggtgtctaattcaacttctgagagtctgtcaggatgagaagctgaggcaggaagggaggtaggcaccatgtccggccatgaagttggcaagaatcccctgaaacaggccagggagatgaatgaagaagataaggctttgaggcaaaaacgatgtccacatctacacagtatttagctcccatttatgccaagaccagcttggttggggagaccctaagccagcggcgctagaggaattaaagacacacacacagaaatgtagaggtgtggagtgggaaatcaggggtctcacagccttcagagctgagagccttgaacagaggtttacccacgtatttactaacagcaagccagtgataagcatcgtttctatagattatagattaactaaaagtatcccttatgggaaacgaagggatgggccgaaataaaggggtgggtctggctagttatctgcagcaggagcatgtccttaaggcacagatggctcatgctattgtttgtggtttaagaacgcctttaaacggttttctgcccttaaagaacacctggtgggccaggtgttccttgccctcactccagtaaaaccacaaccttccagcatgggcgtcatggccatcatgaatatgtcacagtgctgcagagattctggctagttttggggccagtttatggccagactttgggggggcctgttcccaacacatttataagtgagagcatgcagtatttcactttctgtttatgagttgtttcacttaaaggtaatggtctccagcttcacccatgttcctgcaaaagacatgatttcattttatttatttatttattttttgagacagagtctcattttgttgcccaggctggagtgcagtgatgtggtcatagctcactgcagcctcaaactcctgggctcaagtgatcctcctgcctcagcctcctgtgtagctagggctacaagagcgagccactggggctggctaatttttaaaattaattaattacttgctgtgttgcccatgctggagtgcagaggtgtgatcacagctccctgcagccttgacctgctagtctcaaggaatcctcccacctcagccttctaggtggctggtactacaggggtgcaccaccatgcctagctaatttttgtgtgtgtgtatatatatataaaatatacatatataacatatatttatatttatatatattatatatttatatttatatattatatataaatatatatttatatttatatatatttatatatatatgtttttgtagagacagggtcttgctatgttgcccaggctggtttagaactcctgagctcaggcgatctgcctaccttggcctcccaaagtgttggaattacagttgcgagacactgcacccagcctaaatttatttttgtcttatatttctatttaatatttgaggttgaatatgatgaatagaaatacaagcgaagtaaataattttaaataataaaggcggggcatggtggctcatgcctgtaatccagcactttgggaggccaaggtggtggatcacttgaggccagaagtttgagactagcctggccaacatggtgaaatcttgtctctatcaaaaatatgaaaagtgagctgggcatggtggcacgtgcttgtagtcccagctactcaggaggttgaggcatgagaatcgcttgaacccaggaggcggagattgcagcgagccaagatggcaccaccacactccagcctgggtgacagagccagattctgtctccaaaaagaaagaataaatgtgtaaaaaagaatatttaatattatatacatttataaataaacatgttatttatattttatattatatatattttattttatttttaacttttatttttccaatatatacactttttaaaaatatgccactggcccttgagaaaaaatttatttgcactgctagcattcttctactgcagtattagcatttcatataggcactactcttccatttcctacttacattcatttgggctattgttacaaatacagtatgcaattgaagaaaactaatggggggcccagtgtggtggctcacacctgtaatcccagcacttctggaggccgaggtgggcgatcacctgaggtcaggagttggagaccagcctggccgatatggtgaaacttcttctctaaaagtacaaaacttagctgggcatgatggtgtgcacctgtagtcccagctacttgggaagctaaggcacaagaattgcttgaacctgagaggcagaggctggagtgagccgaaattgagccactgcactccagcctgggtgacagagcgagaccctgtctcaaaacaaacaaacaaacaaacaaaccaaacaccaaacaaaaaaacccaaaaaacaaactagtggggaaacgaagctttatatatgtttttcctctttacagcttctcaatatcatgccatttaagtgaaaatttatatggacattttctgtacatatcttgaagggcagagattacactgataaaaccaaaataattgtgcaaggctgggtgcagtggctcatgcctgttatcccaacactttgggaggctgaggtgggtggattacctgaggtcaggagtttgagaccagcctgggcaccatggcgaaaccctgtctctacaaaaaatataaaaattagccaggcgttggtggtgcacacctgtaatcccagctactcagaggctgaggcaggagaattgcttgaatccaggaggcagaggttgcagtgagccaagatcgtgccactgcactccagcctggtcaacagagtgagaccctgtctcaaaaaaaaaaaaaaaaaaaaaaaaaaaaaaaaaatcccaaagcatttaatttgaccaaaaacctctgtaaatagaaatactcagaatgttctttagttagctctctctcaaatatcaagggtgcactgagttcagggcagaaatcacgtgtgaattagttccaatggtatacaaacacatggaaacactaaattaaaagctgccttcctcaaagtgtagtgaggcctcaaaaccactctaactgtaacctcagtcaccaagacagaggacagactgaacatttacctctgcataacaaatgtggctctggcacacctgttatctatccaaattattaactttctttgcctttctagaaaaaggcctattattgaacattaaccatattctaattttaaatgtaattcatttcttaaaaaaaaccactgtctctgaacagataaaaatggcttacataggccaggtgcagtggctcacacctgtaatcccagcactttgggaggccaaggtgggtggattgcctgagctgaggagttcgagaccagcctgggcaacacagtgaaaccccatctctactaaaatacgaaaagctgggcatggccgcgtgtgcctgtaatcccagctattcgggaggctgaggcaggagaatcacttgaatctgggaggtggaggttgcagtgagccaagattgtgccactgcactccagcccaggcgacagagcaagactccctctcaaaaagaaaaaaaaaaaaaaaggcttacgtaatactgttacagaatctttagggtgtcacatttctggtcggaaatatctgtgtcccctggcacctttgccagagttcttgtcttgtgtccaggaagaatgagttacacagggaagtggagggtgaacaggatgaagaggagttttattgagtgttagaacagctcagagaagaccaaagtgggcagctcctctctgtagacagttcattccattgagtgctcagctctcagcagagaggagaccccagagagggtagttcctctctggtcctcctgatggctgcaggtctcagcagagaggaggccttggagagggtggcttctctctgcccagcaggtcatcccatcctcactgcagctttcagcagagagtgtagctcctttctgcagctggtcgtcaggtcatctccagctattagcacagagagtggcttctctctgcagctggtcatctggacgtctctctttttctctgccctgctctggctgagcctggggcttttatggacctcagaggggatgcagtgtgtgccgactggtccattaacagccatgcatgggcctggaaaaggcatcacaagtccccactctggtccacaggtctggtggccctcagccttcaggccctccctggcctgaaggtggggtcttagcgaggacttgctcccttctgccaggaatcagtctgcctcctgctgccgttcatggccccaggttggaccctgactttgctccaagatcagagcaggcgctgagagcagggagaaaccaggcagtgggagcaggtgctttggagcctgcaagggcaggggggcctccctggccccccaagagcacagggaggcttgaatctgcggccacaacttgggcggctgcagaggcccaggatgcagcttcaggtgctcccccttgcaagctggggcggggattcctgatccttgccgggcctgggctggcgcccagggcaggggcaatatcaccacgaactgcccctgttgccccggcactcaggggcagcctgtggggagctgatcctggccccagcctggccacggggagtggcaggcttggtggtcgctctgatgcggggtggaccccaagaacacggctggcaagccctgcacagagcctcctcctgatgcctaggaaccctgaaccctctgcggggtgggtgcagtggctgcgcggctggctagtccccaaagagggcgctgctccctcttcctgcccccgcccccaaagcacggccccagctccacatccgggcccctctctgcccgaccgcgctgctccagcagggcgtgggctccagagggctgtgggctgcgtggccggggagctgtcagcctcctccctgggccctccctgcagcagccatgtgatggcagcagccagacagcccaccacagccatcaataccacacgaattttcacaataagctggacaaactttccctggtggaaaaattagtctgtggccgggtgtggctggccctggctctcccaggaggttttcatgacgtaacctgccaatttgataaatctctgcctcatagagtcacaaacgttcttctctagatgagaagttctccatgattccataaatataaattttaaaaaatttaacctggggccgggcgcggtggctcatgcctgtaatcccagcactttgggaggcggaggtgggtggatcacctgaggtcaggagttcaagaccagcctggccaacatggtgaaacccttgtctctactaagaatacaaaaattagctgggcgtggtggtgtgtgcctgtaattccagctacccaggaggctgaggcaggagaatcgctggaacctgggatgcggaggttgcagtgagccaagatcacgccactgcactccagcctgggtgacagagcaagaccccgtctcaaaaaacaaaacaaaacaaaacaaaaaaaacaaaaactaactttaagttcaggggtacatgtgcaggtttgttatatgggtaaacctgtgtcatgcgggtttgttttacaggttatttcacccaggtgctaagcctagtatccattagctatttttcctgatcctcttcctcccccaaccctccaccgtctgataggccccagtgtgtgttgttctcctctatgtgtccatgtgttcttatcatttagctcccacttataagtgagaacatgcagtatttgtttttctgatcctgcgttagttttctagggataatggcctctagctccatccatgttcctgcaaatgacatgatctcgttcttttttatggtgcatagtattccgtggtgtatatgtaccatattttctttatccattctaccattgatggccatttaggttggttccacgtctttgctattgagaatatgctgcaatgaatatatgcatgcacgtgtctttataatagaatgatttatattcctttgggtttacacctagcagtgggattgctggactgaatggtagttctgtgtttaggtctttgaggaatcctcacactgttttccacaatagtggagctaatttacattcccaccaacagtgtaaaagcgttccttttcttagaagacaatacctttttttgttgttgttgttgttgagacggagtctccctctgttgcccaggctggagtgcagtggtgtcatcccagctcactgtaacctccatctcccgggttcaagcaattctcctgtctcagcctcccaagcagctgggattacaggcttgcatcaccacgcccagctaatttttgtatttttagtagagatggggtttcaccctgttggccacgctggtctcgaactcctgacctcaagtgatccacccacctcagcctcccaaagtgtcaggattacaggcgtgagccaccgtgcccaggcaagaagggaatatcttaatgacaacttctccccgccgctttcctcgccaaaattcttcacattcacctttgccagtgttcctgtaacaacaatagttttcacaattgttctctgaacaagcaatggtagacctgatccagagcctgatattgtcatatcataaattaaatcttttaatgtagttccctctgaaataaaaggataatctttttttttttttttttgagacggagtcttgctctgtcgtccaggctggagtgcggtggcgcgatctcggctcactgcaggctccgcccccccagggttcacaccattctcctgcctcagcctcccgaatagctgggactacaggcgcccgccaccacgcccggctaatttttttgtatttttagtagagacggggtttcactgtgttagccaggatggtctcgatctcctgacctcatgatccgcccgccttggcctcccaaagtgctgggattacaggcgtgagccaccgtgcctggcctaataaaaggataatctaatgaagggtcctctttatttgacacttgatggtgagtgacagtgcggttgtggcagaaacagatcattaacatgagtgagatgcagaggaggcaatgacagctgccagttctatgagacctgggccaggcgacggcttcatagtagttgagtgttttattttattgcaatggtcctgattgcagcaacatattgtggtcacagacccggtttatttatttatgttttttatcttaaacaatttttttttgaggcagtctcactgtgttgcccaggctggagtgcagtgacacgatctcagttcactgcaacctctgcctcccaggttcaagtgattctcctgcctcagtctcccgagtagctgggtctacaggtgtccgccatcatgcctggctaacttttgtatttttagtagagatggggtttcaccatgttggccaggttggtctcgaactcctggcctcaagtaatctgcccacctgggcctcccaaagtgctgggattacaggtgtgagccaccacacccaacgagacaatagattcttgtaaactatagacacccaattgagctaacaaactctaggtcttacttcttttatcaaactgtgtatttgtacccattaatcagcttctcttcattctccccctcaagaataaacttttgtaaaaaagaatcatggagaagctcattctctcttcagttgcttttgctcagccatttctaccttagctatgagttaaaagtaaacccagcctgggcaaggtggctcatgcctgtaatcccagcactttgggaggctgaggcgggcagatcacttgaggtcaggagctcgagaccagcctgtccaatatggtgaaacctcatttctactaaaaatacaaaaaattagccaggcttggtggcaggtgcctgtaatcctagctacttgggaggctgaggcaggagaatcacttgaacctgggaggtggaggttgcagtgagccgagattgcatcactccactccagcctgggtgacagactgagactctgtctcaaacaaaacaaaacaaaagtaaacccagcctggtaaatccgggcagactctgtggctcagtttttgttcttctctaaaatttggtctcatgtggaacccacacattcccacacattaaaaaaaaattaaaagataactgaaaacatttactggagtttgaaccatgggagtcacagggtgattttacaagggctatttttaatcatgggagtgaatctagcggcatgagtggcttgagaaattagtgacaagggaagaatttaagatagcctatagaatgagcttcttttagaagactgttttagggaaataacttcaaatgtaaagcaaagtaggccgggcatggtggcgcatgcctgtcatgtcagcactttggaaggctgaggtgggagggctgcgtgagcccaggatagagactgcacctcagcctggcaacagagacagactctgtctcaaaacaaaacaaaaaggaaggttacatgaatgaaaagtgtacaaggaatacccattgtgtctttcacccagattccccagttaatattcgggcctgcttgcgttatcatttgctctcctcatctctctctctctctttctctgtctctttccctttctgtccctatctctgtctctctatatctctctatctttctatctctatctctttgaaatttgtttaaattttgttttttattttctctatttttgttattttttcttccttttttctctctatctctttatctctatgtatttctctatttcaatctctcgatctcttcatctctgtctctgtctctctccatctctatctctctatctctatctgtttctctacctatctatttctgtctctatctcatctctatctttctatctctacctatctttctatctctatccctccatctctatctctttctatctctctgtatctctctttgtatctcaatctctctatctcaatctctgtctgtatctctctatttctgtatctccatctctatctatctgtatctctctctctatgtctatctgtccatctgtatctctatctctatatctccatctctatctatctctgtctttttcttcacgtctctacctctgtctctttatttcaatctatctcttgatctctctatatctctgtatcccctatttctctatctttctttctctacttctctatctctagctctccgtctctcaatctctccctatctcttcctctgtctcccgatttcccctctcgtctcccttgtgggtatgatttagaagtttcatttatgatgaatctgacaagatcgaggttaagaaacaaagccagaggaaaccacaggctcagaggccagggaagttctgggaaattccccatgcagtgtgagaggatttgagaaacaggagggagtcttggggcatttgtgaaggcgatttcttagaaagaaacacaggactagtcgggtgagctttgctccgtcctttggcccatgttttaagcagatcaaatggtatcattagcccttgggggtataaaatatcaactaatcagcagtcctcttttctttttttaaacatttttattatttttttttaacatagagtctcactgtgtcacccaggctggagtgcagtggcgtgatcatggctcactgcagcctcgacctccttcctaggctgaagcaatcctcccacttcagcctcccaagtagcgtgactaaaagcacacaccaccatgcccaactaatttttttgtttttttaactttttggtagagacaggggcctctccatgttggccagcctggtctcaaactcctggggtcaagcaatcctcccacgttagcctcccaaaatgttgggattacaggtgtgagccactgcaccagctatgcccacatttttctaggtcaatgatacggaataaaaagaaagaaagactagtttctgctctcaagcagtttatattttagagtcaaatctagcaggtgaaatctagtccatggcctgttttttttttctgagacatgctctcactgtgtcacccaggctggagtgcagtggcaccatcatgggtcactgcagcctcgacctcccagactcaagcaatcctcctgcctgagctccccaagtagctgggactacaggcatgtgtcaccacgcccggctagttttttatttttatttttgtagagatgggatcttgccatgttgcccaggctggtctcgaactcctgagctcaagcgatccacctgccttggtttcccaaggtgctgggattacaggcgtgggccactgtgcccggcctccttgcctgtttttgtaagtgaagtttgattggaatgcagccatgatcatttgtttatgtaatgtctataattgccttcatgctgcaatagcagagttcagtagctgcaacagactgtgtaacccctgtggatatgcacatatagggggttagagaagggaagagagagagagattttaagaaatttcctctcatggccgcgcccggtggctcacgcctgtaatcccagaactttaggaggccgaggcgggcggatcatgaggtcaggagatcgagaccatcctggctaacacagtgaaaccccgtctctactaaaaatacaaaaaaaaaaaaaaaaaaaaaaaaaaagaaaagaaaaaaagaaaaaaaaaagaaaaaaaaaggaattgtctcacatgattgatgggactggcaagtctgaaatctgcagggcaggctggacaccccggggagagttgttgaatctgaagtcagagactagaggcaggactccttctccctgtggaggatttcagtctttttctcttaaagccatcaactgattggttgaggcccacccacattatggaggatctcccagggactttacccaaagtctgctgatttaaatgttagtccctaagccaggcgctgtggctgtaatcccagcactttgggaggtcgaggcaggtggatcccctgaggtcaggagtttgagaccagcctgggcaacatggtgaaaccccatctctactaaaaatacaaaaattagccaggtgcagtggcgcatgcctgtaatcccagctactcaggaggctgaggcaggagaatcttttgaacccaggaggcggaggttgcagtgagctgagatctttcggcctcccaaagtgcagggattacaggtgtgagccactgtgcccagccttgtatcctaactgctatatctcttcccttctttgtgtaccaaggtagttctgatattccaacttcatttggtgtaggtcactttctggtccatgattgaagcaacatgccaaactgttagagctcttaaaatttttaaaaattatttatttattttaatggataccctggtacccagttatctccataatatttaggtttccagattcagtggcagtattttcactgtaatttctgaactaatttatttatttatttttgagacataatctctctctgttgcccaggctggagtgtagcagtgtgatctcagctcactgcaacctctgcctcccaggttcaagtgatcctcctgcctcagcctcccaagtagctgggatcacaggcgcacgccaccacatccagctaatttttgtatttttttgtagagatggggtttgaccatgttggccaggctggtcttgaactcctggcctcaagtgatccacccatctcggcctcccaaagtgctgggattacaggcatgagccactgcacctggccgaatttttgcatttttagtagagatgggtttcaccaggttgcccaggctgatctcaaactcctggcctcaagtgatccacccgcctcggcccctcaaagtgcagggattccaggtgtgagccaccatacctggcatttatcttgtttttaatataggatggtaatgccttctttagatcatgtatgttaaatatgctttagaaacaaaaatttccttgatattttgacaaacctacgcttccttaggttaattttcataagtgttaatttttatattactaatcactgtactgctatagctaaatcaactagatatcagtttgtgtagtgttgctcaaaagatgtacaaatagcaagtttgataattgcttcaaaaatgagctttttaaaataaagaaagcaataatgttccaagtcagtggcagggggcaaaatacatacaacaaacatattgagacagagtatcaagtgcccatcagtttctcttataagaataacatgcttgaggaaggtcttgagaaaatcctccctccctctactaaacttttagtttccacatagtgtcggatgttacaattggtatgaaggataaatgcttttaggcaaaagtaaaaagctatctacaggctgggcgcggtggctcaagcctgtaatcccagcactttgggaggccgaggcgggcggatcacgaggtcaggagatccagaccatcctggataacacagtgaaaccccgtctctactaaaaatacaaaaaaatagccgggcgtggtggcgggcgcctgtagtcacagctactccggaggctgaggcaggagaatggtgtgaacacgggaggtggagtttgcagtgagccgagatcgcgccactgcactccagcctgggtgacagagtgagactctgtctcaaaaaaaaaaaaaaaaaaaaaaaaagctatctacaaagcaaaatccatagtgactttttgtaggaggctctcatctctggtggtaatattctttagtacttatacagcatagaggaaattgaaacaatattttggatacagtagcaattatttcttatagtcttactaaatgttacaaaattcctaaatatatgtaaatattcttcttaccacccattatgcaccagtttggggctgcctgatgaagtggctactgtttttgttttttctcttttttgacagggtcgtccaggctgcagtgcaatggcaggatcatggttcactgcagcctgaacctctttggctcaagcagtcctcccacttcagcctcctgagtagctgggactacaggcgggtgccacgtgtggctcatttttgtattttttttgtagatatggggtttcgccatgttttccaggctggtctcaaagtcagaggctcaagtgatatgcctgcctcagcgtcccaaagtgctgggattataggcgtgagccactgcacccagccatggctactattttaacagttaaacattgcacctaggccaggcacggtggctcatgcctgtaatcccagcactttgggaggccaacgtgggctgatcacctgaggtcaggagttcgaggccagcctggccaacgtggtgaaaccccgtctctactaaaaatacaaaaattagctggggaaggtggcaggtgcctgtaatcccagctacttgggaagctgaggcaggagaatcgcttgaacctgggaggcagaggttgcagtgagccaagatcgtgccactgcactccagcctgggtgacacagtgagactctgtctaaaaaaaaaaaaaaaaaaggaaaaacaaaacaaaaacaaaaattgcacctcaaaagttctgccatccatgcacaagaaacgggcacaatagtgaggactcctcagagatggcaaactacttcccaagtgaaaagttagtgatagagtgtctccaaattagaggagagagggacatgggtaagggaggtaggtagagcaaaaggactttaaaataatactgcttaggagtgtgtatgcgtgtgcatatatatgccatcacacccacctaattgttaaaaatttttgtagaaatgaggtctcactatgttgcccaggctggtcttgaacacctgggctcaaacactcctcccatctcagcttcccaaagtgctgggattacaggtgtgagccgctgtttccagccaggagtgtttttttttaaaatttatttaattaatgcatttgtttatttatttagagacagggtctcactctgtctcccaggccggagtgcagtggcatgatcttgcctcactgcaacctctgcctcccagattcaagagattctcatgcctcagcctcccaagtagctgggactacaggcatgtgccaccacgcctggctagtttttgtgtttttagtggagacagggttttgccatgtttggccagggtggtctcgaactcctgacctcagttgatctgcctgtcttggcctcccaaagtcctgggattataggcatgagccattgcaccctccagtagtgtttttttgtttgtttcttttttcttttcttttctttttcttctttttcttttttttttttgtttttgtttttttgagatggagtcttggtttatcgcccgggttggagtgcagtggcatgatcttggctcactgcaacttctgcctcctgggttcaagcgatcctcctgcctcagcctcccaagtagctgggatgtagacgtgtgccaccacaccctgctaatttttgtatttttactagaaatggggttttaccatgttgcccaggctgctcttgaactcctgacctcaggtgatccacctgtcttggcctcccaaggaattacaggcatgagccatcacacctagccaggagtgtttatttttaagataacttctataccttgtctgtccttgatcctaatccttgaataactcatgttcgtgctaaatacaatttctactctaaaggaagaggagtggtctgttaggagaagcatattttaaggagaagacacgaagacatctctgtcataaatgcaagtttacttggtgagtcttttggttacattactacattaactgtttctgctgctatttcaatctctttatcattgggacaggtattgttgaacatatccctactacttgtattcgttaggtatctccagatgccagtcattccttttttttctatatttttttattttctatatttatttatttatttttgagatggagtctcgctttattacccaggctggagtgcagtggtatgatctcggctcactgcaacctccgcctcccgggttcaaggtattctcctgcctcaccctcccaagtagctgggattacaggcacccatcaccaagcctggctaatttttgtatttttagtagaaatgggtttcaccatgttggccaggctggtctagaactcctgacatcaagtgatccacccaccttggcctcccaaagtactgggattacaagcatgaacaccgtgcctggccagtcattccttttggaatatcaaagttgtgactttttttttgacaatatgcagtttgggcagcagatggcaatcagctaatgccattttattgccattcagaaatttatgtgtagaaaacttagtgtcctgcatgctattttcatcaatttcatcagggagaggagaattcagatattcataagtttttgcagttttttttttaacttttattttagctaccagggtacatgtgcaggatgtgcaggtttgctacataggtaaatgtgtgccatggtgatttgctgcggagatcaacccatcacctaggtattaagcccagcattcattagctattcttcctgatgctcttcctctccttgccccactgacaggccccactgtgtgttgttctcctccctgtgtccattgttcagctcatagttataaatgagaacatgcgacatttgattttctgttcctgtgttagtttgctgagaataactgctccagctccatccatgtccctgcaaaagacatgatcttgttcctttttatggttgcatagtattccatggtgtatatgtaccacattttcttcatccagtctatcattggtggacatttgggttgattccatgtctttgctattgtgagtagtgctgtagtgatcatatgcgtgcatgtatctttataacagaatgatgaatattcctttgggtatatgcccactaatgggattgctaggtcaaatgtttttcctgcttctagatctttgaggaatcaccacactgtcttccacaatggttgaactaatttacactaccaccaacagtgtaaaagcgtttctttttctctgcaacctcaccagcatctgttgtttcttgactttttaataatcaccattttctgcagggtttttaagagatgcttcactcatgcttcattaacctctggccttgaattcttgatctatgcagagaatttggcaaagatgtccattccagcagtatttgattctgggtgttttggtgaaagctttaagtacttgggaggacataagacttcttcaggagcttcctcaatcttatttgacttcactgttgaaagttataagtggtgggtggttcccaggagccttgttttgcagatctgcaggtttcctttttcagatcaacagttgtgacactgaagacaactcctttgagctaaagaatcatgaggaatctctgggaaaaaaggcagattcctgtgctttcaccatcactgacagccttgacccagagctcaaggaggggctctttgtcttcctccttcaacttgttcagtggcatcgacaatgccaaggccaggtcagctgggctttgcaaacgttggcagctgctgcttctgctccaaggctgctctggctgatggctttggccatgctgctcactggacagtctggcattgaggtggccatggcctcagctcctcagcactgcaccacactgcagattgagccacttcttcaattggccttaaatttatcaaagggaaattgtctaggtgagcctgagttaatcacacaaactctataaatctgaatgtagaagtcaaatatcaagaaagtcagaagccagagagattcagaccttgagaaggatttgacctgtcgttgctggctttaaaggtggtaaggaccacatgaaaaaaacccaagaacatcttctaggagcagagtgatccctggctaacaatgagctaaaaaaacaggggcctcagttctacactgcaaggaactgaattctgccaacaacactaatgagtttgaacacaattcttccccagactccagatgaaaacacagcttggtcaactccttgattgtataaccctgagaatagaacccatataaatcttgcccagattcctgatgaagacaccatgaaaataatgaatgagtgttgtttcaagccactaagtttgtgatgatttgttacacggcagtagctaactaatacagagttatgtggccaacctgttgattgggatcaacagtcttattttgcaaagatacttcagaaccatggacagtggaacgcatgccaggggagagctgattggctggattagttaccatccaaactggagtgatcctattggacaatctttgacctagccactgatccctggtccagtcagattttgttagggtctacagactcaacttctctgccaaccatgaagatggtgcctcaggagtcctgtaaggtcttgagtgaacaagtctctgcctagttcttcagaaggatattgcaccaccctcttcctcatctacattagcctcctttggcttctccttcccacttcccagctattgcccagtgatgttcctgcagtcaggaactcccttcctttctctctttgatactttctatcctttacctagccaactctcattttttttttttttttttttttgagacagagtctctctgtcacccaggctggagtgcattggcatgctcttggctcactgcaacccctgcctcccaggttcaagcaattcttatgcctcagcctccccagaaactgggattacaggcgcacaccaccataccaggctaactttttttttctttttcttttattattatactttaagttctagggtacatgtgcacaatgtgcagttttgttacatatgtatacatgtgccatgttggtgtgctgcacccattaactcgtcatttacattaggtatatctcctaatgctatccctaccccctccccctatcccacgacagaccctggtgtgtgatgatccccttcctgtgtctgagtgttttcattattcagttcccacctatgagtgagaacatgtggtgtttggttttctgtccttgtgatagtttgctcagaatgatggtttccagcttcatccatgtccctacaaaggacatgaactcattcttttttatggctgcatagtattccatggtgtatatgtgccacgttttcttatccagtctatcattgatgggcatttgggttggttccaagtctttgctattgtgaatagtgccgcaataaacatacatgtgcatgtgtctttgtagcagcatgatttataatcctttgggtatatacccagtaatgggatggctgagtcaaatggtatttctagttctagatccttgaggaatcgccacactgtcttccacaatggttgaactagtttacagtcccaccaacagtgtaaaagtgttcctatttctccacatcctctccagcacctgttgtttcctgactttttaatgatcgccatcctaactggtgtgagatggtatcccattgtggttttgatttgcatttctctgatggccagcgacgatgagcattttttcttgtgtctgttggctgcataaatgtcttcttttgagaagtgtctgttcatatccttcacccactttttgatgaggttgtttgattttttcttgtaaatttgtttaagttctttgtagattctggatattagccctttgtcagatgggtggattgcaaaaattttctcccattctgtaggttgcctgttcactctgatggtagtttcttttgctgtgcggtaatttttttttgttgagatggagtctcactctgtcacctgggctggagtgcagtagtgcaatcttggctcactgcaacttctgcctcctaggttcagtgattctcctgccttagcctcccaagtaactgggattacaggtgcctgacactacactcagctaattttttgtgtttttagtaaagatggggtttcaccatgttggccaggaaggtcttgaactcctgacctcaagtgatcctcccaccttggactcctaatgtgctgggattacaggcatgagccaccatgcctggcctgatatctctgaaatttaaaaactatttagaatctcactgggacttatgtgctttcattgctaatgatctgctgctaaacctgtataagccccttccctctaggctcagggactgtcacataagaggtgggcatgtgagattgtaagggccaaatttgagggatagaattatttcagaccctcctactcaagcatgggcacacagatgcccaaacatctgccaaaataagactgtgtcttggcctactatgttgcctctctccatccatcccaaccataaaaagttttgctctccatagaattaaacaaaaattacggaaagatatccagatacctggtgtattagtctgttttcatgctgctggtaaagacagacccaattctgggtaatttatacaggaaaaaggatttacagttccacgtgtctggggcagcctcacaatcatgaaggaaggcaagaaggagcaagtcacgtcttacatggatggcagcaggcaaaaagagagcttgtacagggaaaccctgtttttaaaaccatcagatctcatgagacttattcactatcatgagaacagcatgggaaagacctgcccccatgattcaattgcctcccaccaggtacctctcacaatgtgtgggaattcaagatgagatttgggtggtgacacagccaaacaatatcacctggtgacaaagccttctggatatagtgctcccagtaataaaatgatgccaattatataaacaattttatcagccaccttaggaggaattactaaaaagactacaaaaagccttgcagcacattgaaagtctctaaattccttagcttaaatggttttaggaaaatgcttatgttttgtatagctaattactacaagcgtgtaactacaaccaagattacagtagctcaatgcatagaacttaaatagatgccaattttataacctcgccttttggcatttgatttttggctctcatgttacctaaagggttcccagggttaatgagaacctgcccaccgccattcccatctggcctggaatatttagttggctataaacattttgactccaaatcccttgggcatggggtcccaccgagggacatgttgggcctgggtaggcagacacaccaccccagcaataatatgggacaaaatagaagtttggccatcgatgttgcatctggcatataatgaccaaaaaaagggggaatgtaaactgataattaaatcccaagctccctcttcccactgctactgacagaatggatccctccttggccaagggaagcccctgtaaaaaaccttaaaaacttagttcccagacataatgggatgggaggccaggcataccttctttttgtggtttagacacaaaaactgaccaccattaatggtcaaataaaaatcacaagacagaacaggctttctgtaacaataagatagcgaattaagccaggtatggtggcgtgcacctgtagtatcaggttgccaggtccgatctgtggaccctgacccagtgatggatgaaagacgtacactgacacagacattttgcctgtcagtgtggctaaggggctctgctgcctgagtccacagcattggcctcgataaactggcgaagtttgcatttatttagtacagattaaatgacaaatgtctcaagtaaacaccactggagggtaattaacattgctgacctcctgagtagagagcagtcatgcacccgcagatgaccaaaggtcagtcttaggaccacatgagtaaacaagctatttagataaattcctctacattcctatgtatctacgccctaagcttttaagagaattcagctgcctccagccaaatcttttactgaagtgatgcaaactacccggccttccaagaaagtttgtgtctatttcctataactctataatttctcccaccaccctgaccaatctcctacaccaggtatttgggagactgaggtgggaagatagcttgagcctgggagttcgaggctacagtgagctatgactgtgccactccagtccatcctgcgtgacagagcaagatcgtgtttcaaaaaaaaaaaaaagataccaaattataaacagaacctaagaccatgccagcaaaggttaaatcacacactccttcacttaaaaagtaaactatgttcatcccagcactttgggaggctggggtgggcagatcatgaggtcaggagatcaaaaccatcctggctaacatggggaaaccccatctctactgaaaatacaaaaaattaaccaggttggtggcatgcgcctatagtctcacctactcgggaggctgaggcaggagaatcgcttgaacctgggagacggtggttgcagtgagccgagatcacaccactgcactccagcctggatgacagagtgagactccatctaaaaaaaagaagtaaactatgttctaaatgccacaaagtttttctttttcccaagcagccaaacaagcatttgcctctagataagcaacgttaaagcactttgcagctccactggatgctaactgaccaccagccataactatggctttaattaggcaagagacttatttcagtaactttttcctgatgaagaaaccactgaccacgggctagatctggctggtttacagaaattgcaagcttgtgtgcctttttgtcctgaaaagaacttttgatctatagggcttaatagtaatatttttattctattctattctattctattctattcttttttttttttttttttgagatggtatctcgctctgtcacccagtctgaagtgcagtggtgcgatcttggctcactgcaagctctgcctcccgggttcacgccgttctcctgcctcagtctcttgagtagctgggactacaggcgcccacgaccatgccaggctaattttctgtatttttagtagagacggggtttcactgtgttagccaggatggtctcgatctcctgacctcatgatccacccgcttctgcctcccaaagtgctgggattataggcgtgagccaccgcacccagctttcttttcttttcttttctttttgaggagtttcactcttgttgcccaggctggagtgcagtgatgtgatctcagctcactgcaacctctacctcctaggttcaactgattctcctgcctcagcctcctgagtagctgggactacaggcacaggaaaactcctgtttttaaaaccatcagatctcgtgagacttattcactatcacttatagccccactatgcccagctaattttttttttgtatttttagtagaggtggggtttcaccatgttggtcaggctggtctgaaactcctgacgtcaaatgatccacccaccttaacctcccaaaatgctgggattacaggtgagccaccatgcctggccccacaatatctttaaatcaatgactctcctcatggtttggataaggtccctccagatggaaaaatttgcttgtgattttagccatgattatagggatagctttatttttctaccctggactgtattgctgttgcatgctatgtatgggaatgcaagactggctttcccagaggcttctttttttttttttttgagatggagtctctctctgtcacccaggctagagtgcagtggcgccatctcggctcactgcaagctccgcctcccgggttcacgccattctcctgcctcagcttcctgagtagctgggactacaggcgcctgccaccatgcccggctaattttttgtacttttagtagagacggggtttcaccatgttagccaggatggtcttgatctcctgacctcgtgatctgcccgcctcagcctcccaaagtgctgggattacaggcgtgagccaccacacccggctgctctgatctttattatttctttcattctactgagtctgggtttggttggctcttgcttttctagttctctaagatgcattgttagtgtgtttattttaagtttttcttcttttttgatgtaggtgcttatagctaaagcttccctcttagtactgctttcactgtaccccataggttttggtatgtcatgttttcattatcatttgttttgaggaatttctgaatttattttttaattcttcattgacccactggttgttcaggagtgtattgtttaatttccattgtgtttgtatactttccaatatttctcttgttattgatttctagttttatttcattgtggtcagagaagatgcttgatattattttaattttttttgaatattttaagacttgttttgtgacctaacatatggtccatccttaagaatgatccaagtgctgaggaaaaggtgtttattctgcagctgttttcaatgtttattctgcagctttatttaacgtttattctgtagctgttgaaagaaatgttctgtaaatatctattaggttcattttgtctatagcgcacattaattctgatgtttctttgttgattttctggctggaagatctgtccggtgctgaaagcaggttgttgaagtttccagctattattgtattggggtctatctctcactttagctctaatagtatttgcttgttatatttgggtgctccagtgttgggtgcatatatattaacaatggccatattctcttgctgaattgatccctttatcattgtataatgaccttctttgtctcttcttatagtttttgtcttgaaacttattttgtctaagtatagctactcctgctcttctttggtctccattggcatggaatatctttttccatcccttcattttcagtctgtgtgtatctttataagtgaagtgtgtttcttgtgggcaacagatcattgggtcttgtttctttttttaattcattcagtgaccctatatcttttgattggagactttagtccatttacatttaatgttattattcataagtaaagacttacttctggcattttagtttgctttctggtcttcctttccttctttcctatcttgtttttagtgaaggtgattttctctggtggtttaatttaatttattgctttttatttgttttgtatccattgtatgttttttgatttgaggttgccatgaggcttgcaaatactatcttataaccattattttaagctgataacaccttaacactgcttgcataaataaacaaacaagcaagcaaaaagaatactagtaaaaattctaactttgcaggcagggtgcagtggctcacgcctgtaatcccagcactttggggggctgaggcaggtggatcatgaggtcagacgttcgagaccagcctggccaacatagtgaaaccccgttgctactaaaatacaaaaaattagctgggtgtggtggcgggtgcctgtaatcccagctactcgggaggctgaggcaggagaattgcttgaacctgggaggtggaggttgcagtgagctgagatggcaccactgcactccagcatgggtgacagtacgagactccatctcaaaaaacaaaacaaaactctaactttgccttcctgctttttaactttttgttgtttctgtttatatcttattgcacagtctgtgtcttgaaaagctgttgtaggtattatttttgattgttttatcttttagtctttctagttaagataagagtcctttatgcaccacagctacagtcttataatactctgtgttttttctgtgtacttactattaccagtgagtgttgtaccttcggatgatttcttactgctcattgacaaccttttctttctgactgaatcactttccctcaaattcacttagggacccagagcactccaccctgcagtggcaaggcttgctggaactcaagccctgaccactgaaatgggtgattccgctctggttagggccagtccaactgcttcccctatggatgggtcagctggggacagcccagttccgctttctgctgtgacaagtgagcagtgaattcaatgcaaagcctcacaattgctgcgctttccccctcccaactcacagactctctgtccacatggttgctgctggggggggtgggggaggggtggcattggcaattcaagactgtctttccttccctcttcagtgcctctttcagcgatatgaagtcaaaaccaggcactgtgagtgctcacctgatttttgggtcctaggaaggcactccctttgtgtagctagttgtcaaacttggtgctcctgttggagggatgattggtggcactctttatttggccaccttgctctgcccttcccagaagattctcttgtgtaagcccagggacttgtgaatcctttcaactccaggtggataggttctaccccatggctgcctaattctgccccttttcagcaggaagtagccagaatggatgcatcacctgttttccatagaaatggaatggagtttgatggtggggatttcgtaactggggacttcagtttaaaaatatattttatttattaatttttttattaggatagtcaagtgaagcagtgggagtggagaaggaacaaagaaatatgtaactggttgtgaacaattagttgtaaacaccactgcacttggaccagcctaaaaagatattttaattgccgggtgcggtggctcatgcgtgcattcccagcactttggaaggctgaggtgggcagatcacctgaggtcaggagttcaagatcagcctggccaacatggtgaaaccctgcctctactgaaaatacaaaaaaattagccgggtgtggtggtgggagtcataatcccagctacttgggaggctgaggcacaagaattgcttaaacccgggagaaggaggttgcagtgagctgagattgcaccactgcactccaacccgggcgagaagagtgagactccctctaaaaaaaaatatatatatatgtgtatattcatttatttataagtatctatctatctatctatctatctatctatctatctatctatctacacacatatatacttttaatcaccctcctctcctctcacctcttcattccttccctctctagatactcccttctggcaatgcatgcttatctaattaggcacttccttgagaaattccagaggctaatcttaaaacaaaccaggcaaatcaggagccctgattacagaatcctttcacttagggagagccactaatactaatggttagtccaccatcatttggacaaagtcaagataataccaaccagacccctgaacagacgacaacccaagttagccattggaacaagacacacagaccccataccgtgcaccattctactccacatctcccatactgaagtggcattgttgtctggggtaaatacctgggagtcgtcctcttgcaccaagaagattaacaatatggacacacacacatggaatgggttaagaagcagaaagtttaataggcagaagaaaggagagaagaggagcagctctctccctctttcgagagagaggtgtctgaaaaggaaaaagtggtggacctcatcagattttacaggcaggcttgagaaggaggtgtctgacttatgtaaggcccacagattggttcgaccaggtgtgatgtttacatggtgcgtggggaaggctggttgccccaccctaatcttatcatgcaaatggctttctgcttggtcagtgccatcttgtctgcctcttactgtacatgtggctggcaaagagaagagaagacggagctgccattttgagcatgcctattcccgagtagtttcttcctattggcacaactgccagcattcacctgtgcaaacttctagcttttttgtctatgtctgccactcgattttacaggctgctctttgctagagaagaaaatgatttgggggctgcttttcattaagaggaagaccttaccgaggacccccatatctccctatctgcctaagtaatttcttcttaactcctatatcaataccaagctttcctgtaaaatccctatggtaagattttaaaatttaagatgatgtttaagactatagtctcccatcttcccagtctgctggctctctgattaaacctgcttttccttcctccaatccttgtctcttgagtctggctttcaaatgatgagcagccaaacctgggttcgtttacacaagtcctgaaccacatgactgtttccctaacacacatagcatcttcccgctttcctcagatttctattcttccagttccaaacccaggccacgcttggtttatcgatggcagtgcttctaaacccaatcaattttcaccagctaaagctggatatgatgtcgtgtcccacatctttattatcgaagctgctgcacttcctccctccaccacttcccaacaagccaaactaattgctttaactcgtgcgctctctcttgctaacagaatgcacattaacatttacacggactccaatatgctttccacatcctccataaccatgctgccctctgggctgaaagaggcttctttaccacacaaggctcttccatgatcaatgcctccctaataaaggccctccttaaggctgctctcccgccggccatggctggagtcattcattgtaaaggacaccagaaacctactgatcttattgcaaaaggaaatgcctatgtcgacaggacagcaaaagaaatagccaatgcctccacatctgccaatattccagcccccgctccagagggccagtatttttctttctcctctatcactcccacctactcttcttctggaaacctgctctaccagtcttttccaactcagggcaagtggttcttaaatcatggaaaattcattcttcctgcctcacaagctcagttcattctttctttccttcatgaccacctccatgtgggatacaagtctctggctcgcctcctacagcccctcatctccttccctctgtggaaatccatccttaagaccatcacctctcaatgctctgtctgccatgccaccagcccccaaggctttctcaggcctcctccttttcctatgcatcaggctcgtggatttactccgacacaagattggcaaattgacttttctcatatgccccatgtccgtaaatttaaatatctcctggtttgggtcgataccttcaccggatgagttgaggcttttcccactagctccgaaaagggtactgccatcatctcttcccttctaacagatataattccccgatttggcctccctgcttctattcaatctgacaatggtcccgcctttattagtcaaatcacccaagcagtttctcaggctcttggtattcagtggaaacttcataccccttaccgtcctcaatcttcaggaaaggtagaacagacgaatggtcttttaaaaacacacctcaccaagctcagcctccaacttaagtacttctaccacttgccctcctcagaattagggcctgtcctcgagaggccacagggtacagtccatttgaacttttatatggacgcactttcttgctgggccccaacctcatcctagacaccagccctctaggcggctatcttccagtcctccagcaggctagacaggaaattcaccgggctgctaatcttctcttgcctactccagattcctagccatatgaagatacctcttttagtacatcctctcatcttttcactttacatttccagttttgccttacacaaggtctctttttccttcgtggcttctccacctacatgtgtttagctgttaattggacaggcacatgtacactagttttccttactcccaaaaatcaatttgcatatgggaccgaacagcttcctgttcccctcatgacaccaacatttcactgctgttttgtttttcttactattaatataagaagacaggaataggcctgaacttgctcactgctgaaaaaggaagactctgcatatttttaaatgaagactgttgtttttacctaaatctatctggcctggtatatgacaacataaaaacactcaaggacagagcccagaaactcgccagtcaagcaaataattatgctgaaccactttgggcactctctagttggatatcctgggtcctcccttagtccttaaatacctgtttttctccttcccttattcagaccttgtatcttccgtttagtttctcaattcctacaaaaccacacccaggccatcagcaatcattctatatgacaaatgctccttccaacaaccccacaatatcatcccttaccccaaaatctttcttcagtttaatctctcccactctaggttcccacgccacccctaatcccactcgaagcagccctgagaaacattgcccattatctctccataccacccccccaaaaactttttgccaccccaacacttcaccactattttgttttgtttttcctattaatataagaagacagtaatgtcaggcctctgagctgaagctaagccatcataacccctgtgacctgcacgtatacattcagatggcctggagcaactcaagaaccacaaaagaggacatttcactattgtgatttgttcctgccccaccccaactaatcaatcaatcaaccttgtgacattccttctcctggacaatgagtctcatgatctccccaccgcaccttgtgaccccgcccctgcccccaagagataaccacctttaactgtaattttccactacctacccaaatcctataaaactgccccaccccatctccctttgctgacactctttttggactcagtccacttgcacccaagggaaataagcagcctcgttgctcacacaaagcctgttggtggactctcttcacatgggtgtgtgtgacaggatagtcctattctaccctccttgcaatagtctttttgaataaagtcttcccttgctaaattcagatttgttttttatttgacagagtaatggtcggtgcacataaaagactaagcatgcacaaaagtgtgcacacaaagataaaggctgggtgtgtgcacttgaggaggctgtgctcagtgtatgtgtgtgtgtgtgtgtttatgggtactggtggtaggtggtttttgagttgcatatgcatctgagagtccagatagtctctgaatgtaaagaaagcttggtcttgtctgggcttgtctgggcttgccccctgagcggatgagacacaccccgtctcagcctatttgaataacggcaaagtgttaagccaattctcagggaggaaacaatcttgcaaatacaatatcatcttggggctggaggagagaagaatctgccacaggtctgccagtggaagtgtttgccttctctgggtcttgtgtggtcccatcagagaaccagggtatataagacagacaccagagaacagcttcactaagaccagaagaccccagcaccctcttccagaatgccctgggtcttgcatggcccccatggggaaaccagggtatatatgagaaagacgtcagagaacagtttcactaagactggaagagcttacttccctcttccagaatgcagtatttggagcaggagaatctgctctttaatagctttcagctacacaggtttcagttcctcaaaggctgcacttctgacgttgagaagtcagaacatagtaatatctgcatgaacattgcagcattactatttttttttaaattttactttaagttctgggatacatgtgtagaatgtgcagacttgttccataagtatacatgtgccatggtggtttgctgcacctatcaacccatcatctaggttttaagccccacatgcattaggtatttgtcctaatgctctccctccccttgccccccaacccctgacaggccccggtgtgtgatgttcctttccctgtgtccatgtattctcattgttcaacccccacttatgagtgagaacacgcggtgtttggttttctgttcctgtgttagtttgctgagaatgatggcttggcttccagcttcatccatgtccctacaaaggacatgaactcattctcttttatggctgcatagtattccatggtgtatatgtgccacattttctttgtccagtctgtcactgatgggcatttgggttggttccaagtctttgctattgtgaatagtgccattgcagaattatttataatagccaagacatgaaaacaacataagtgtccattaatgaaagaatagataaagaaagtatggtctacagacacattggaatactatttcatcttacaagagaagaaaatcctgacatttgggacaatatggatgaacctggaggacattaggctaagtgaaataagccagacacagaaaggcaaatactgcgtgatcttacttatacgtgtaagagttaaagaaagagaaaagaaacacgaaaaggggctcaacagtcaaagacgggtttattttggagaataaacctgagaggggcttctggccaattttggtcaagagtgctctctcttacagattaaaagtatatattggttttagggtgagggggcttatcacaagcttggaatgtttctgtgtggaggagaggtttatggcggggggttggaatgtctctggtcacaggggaggttatcttggggctgacatcttcccagccagaaaggaggttatcttggggctggaatgtctgtggttgaggatgttatttgtggtttatggtcatagtgaccttagccattaggctgatgccatttggatttaggcagttttttgatcaagatgaaacttttttttttttttttttttgggatggactctctctttgttgcccaggctggatgcagtggtgtgatctcagctcactgcaacctctgcctcccgggttcatgccattctcctgcctcagcctcctgagtagctgggactacaggcacccgccaccacgcctggctaatttttttgtatttttagtagagacggggtttcaccatgttagccaggctggtctcaatctcctgacctcatgatccgcccaccttggcctcccaaagtgctgggattataggtgtgagccaccccgcccagctctgatcaagatgaaacttaaaatggcagcacttgtccaagatggtgatactcctgttctgtcaatatggggaatctttaaaaaaaaaaacaaagccaaactcttagacagagagtagaactgtggttaccagggaataggggtaggaggaaatgagcagatattggggcacaaatatgtgggctctctggaggcttgcgagctattaaggagtgggtttaccccaaattggaaaatgtgggctctgcgttcaaatagcctcacttgggtcttagggctggtaaggtttgctggaaatttgcatgtgcattgtacatacacacaccagcatgatatttaaatcagtattatgagaattttaaagagatacagttttcctatctcagcacaacagactcatgaagcatttaccatcacccttaaaaaagaccacacacaaagtgtggtcggttaattggtgaattacgtagattcatcaaaacaccagttcctcctttgtgcaggctaaatttatgacagtggacatctctggtctctatcctgttaatctggatgtccgagtttaatgctaaatttcaaaagatgaggctgggcacagcagctcatgcctgtaatcctagctctttgggaggccaaggtgggtgggtcacctgaggtcaggagttcaagaccagcctggccaacatggtgaaacccagtctttactaaaaatacaaaaaaaaaaaaaaaaaaaaaaatagccagacttgttgtgatcttggctcactgcgacctctgcttcctgggttcaagcgattctcctgcctcagcctcccaggtagcagggactacaggcgcctgccatcatgcctggctattttttttttttttgtattttagtagagatagggttttgccatataagccaggctggtcttgcccttattacccttctgaccaagccgaggcgggtgatccttcccctctctcagctgggacaggtgaatcacccgtcttggcctcccaaagtgctgggaacaagcatgagtcaccgctcgtggtcctgttaatggacattgaatttccttttgaggaggtggacaagatggtgattaactgttaacggactttgaattttcttttttctttcttttctctctctctctcttttttttttttttggagatggagtctcgctttgttgcctaggctggagtgcagtggtgtgatgatcttgggtcactgcaacctctgcctcccaggttcaagcaattctcctgcctcagactcctgagcagctgggaccacaggtgcccaccaccacgcctggctaatttttttctatttttatagacatggggcttcaccacgttggccaggctggtctcaaactcctgacctcagctgattcacctgctttggcctcccaaagtgctgggattacaggtgtgagccactgcgcctggccttgtattttcttttctataaaaccctgtgtatacactcttttttcaaaaattgaggtgaaaatcatgtaacatcaaataatccttccttccttcttccctccttccctccttctctctctctctttgtctctttctttcttttttttctttatattcctttgtcaccctaggtggagtgccacatgaacatagctcactgcagactcctggattctagcctcctgcctcagccttcctgttaatggacattgaatttctttttctttctctcttttttttttttttggaaatggagtctcactctgttgcccaagctggagtgcagtggcacgatcttggctcactgcaacctctgcctcccaggttcaagcgattctcctgcctcagcctcccgagtaggtgggattacaggcaggcgtggtggtggatgcctgtaatcccagctactcgagaggctgaggcaggagaatcacttgaactcgggaggtggaggttgcagtgagctgagaccgtgccactgcattccagcctgggtgacaagagcgaaactccatctcaaaaaacaaacaaagaaacaaaaaatcaaaacaaacaaagaaaaaagaaaatagaactgattcaaatgacggttaagcacctgaagaaaagttctggactggtagaaacacaaggaaaccctcaaagactgtatatctaaaaaattctattttatattcctgtgaacagttttaatcctatgtggtagattaatgtaagttagtttatacaatacatatttttcctttttgactggcttatttcattgagtataatgtcctcaaactagtcatgccttcctaactatcccccaaagtcttaactcatttcagcattaactcaaaagtccacagtccaaaatctcatctgagacaaggcacgtcccttctgtgagcctgtaaaatcaaaagcaagttagttacttcctatatacaatggggtacaggcgttggatatacccattccaaatgggagaaactggacaaacgaaggggctgaaggtcccctgcaattccaaaatccagtggggcagttaaatcttttttttttttttgagacagagtgtcgctctgtcacccagtctggagtacagtggctcgatctcggctcactgcaacctctgcctcccgggttaaagcgattctcctgcatcagcctccaagtcgcggggactacaggcgcacgctgccacgcctggctaatttttttttttttgtattttagtagaaacggggtttcaccatattgcccaggctggtctcgaactcttcagctcaggcaatctgctcgcctcggcctcccaaagtgttaggattataggcatgagccactgtgcctggccaggcagtcaaatctttttttttttttttttttaattatactttaagttctagggtacatgtgcacaacgtgcagatttgttacatatgtatatatgtgccgtgttggtttactgcacccattaatttgtcatttacattaggtatttctcctaatgctatccctccccccctcccccgactccacactccacgacaggccccggtgtgtgatgttctcctccctgtgtccaagtattctcattgttcaatttccacctatgagtgagaacatgcggtgtttggttttctgtccttgcaatagtttgctcagaatgatggtttccagcttcatccatgtccctatgaaggacatgaactcatccgtttttatggctgcatagtattccatggtgtatatgtgccacattttcttaatccagtctatcattgatggacatttgggttggttccaagtctttgctattgtgaatagtcaggcagtccaatcttaaagctgccagataatctcctttgactctgtgtctcacatccaggtcacgctgatgtaagtggtgggttcccatggtcttgggcagccccttccctgtggctttgcaggatacagcctccctcccggctgctttcacaggctggcgtcgagtgtctgtggcttttccagatgcatggttctgagtccaggtaaggttggagaggggctgcagggctagatttgtgagggcgggtggcgcatgggtctcattttccctccctcagctgggacaccccaccactcctctcacttccccttctagaagtgagatcatggatgcaagatgcgggattatctggcttggaatcctgagtccactactatgtagatgaattgcctcgggcttgtgactcaggttttctgccactattttcctcaactgttaaatactgaggttccagctgttacaaaaccagtaactttggacagatgactcaacggtttacgcctctgttttcctcatctgtgaaatgggaacaatgatgattcctccagctttgtagggcttgcatgaacacgagctgagttaatgggataaaacagtgtgcagtccatattaaatgccgtaagaagcacttgactttgagtccccagttccaaaatccaaaaagccctggaaatcaagttgttttggtgaattgtttggcagcaatctctgacctgaactaactttttgttaattgtagtcttttttttttttttttttttttttaaagacagtctcactctgccacccaggctggagtgcagtggcactatctcagctcactgcaatctccacctcctgagttcaagagagtctcctgtctcagcctccctagtagcatggattagaggtgcccatcaccacacccagctaatttttaaatgtttagtagagatgaggtttcaccatgttagccagattggtaactgtggtcttgattttttttttttttttttttgagatggagtttcgctcttgtcacccaggctggagtgcaatgacatgatcttggctcactgcaacctccacctccggggtttaagtgaccctcctgcctcaccctcctgagtagctgggtttacaggtgccggccaccatgcctggctaatttttgtgtttttagtagagacggggttttaccacgtcggccaggctggtctcaaactcctgacctcaggcgatccgcccacctcggcctcccaaagtgctgggactacaggcatgagccaccgcgcctggcctgtagtcttgatttttatcccacttagtgtgaatgttaacacttctcattgtaaaaaaaaaaaaaaaagatgtggtgtttgattacaaaatgctgtcccgacctcactgaggtgatgcataaaagatggtataagcgctaggcgcggtggctcacaactgtagtcccagcactttgggaggccgaggcgggtggatcacaaggtcaagagatcgagaccatcctggccaacatggtgaagcccgtctctactaataatagaaaaattagccggacgtggtggcggatttctgtagtcccagacttgggaggctgaggcagaagaattgcttgaacctgggagggtggaggttgcagtgagctgagattatgccactgcactccagcctggacaacagggcgagactccatctcaaaaaaaaagatggtataatcctgtacaccatctttaaatactggtaaattctgagttccaaaatgtatttgaggtccaggcagtggctcatgcctgtaatcccagcacttggggagaccgaggcgggaagatcggcatttcgggagattggagtttgagaccagctggggcaatgtaatgagacctcatctcaaaaaaaaaaaaaaaaaaatagccgggtgtggtggcctgtgctggcggtcctagctatttgggaggctgaggtgggaggatcgcttgagcccaggagtttgaggccgcagtgagacaggatcatgccaccgcactgcagcctgggcgacagatcaagaccctgtattttcagtagaggtgaggtttcgccatgttggccaggcttgtcttgaactcctgacctcaagtgatcttttattattattatttaagttctggggtacatgtgcaggatgtgtagttccattacatagttaaatgtgtgccatggtggtttgcgacacccctcaccaggctgcagtgcaatgacgcgatcttggctccctgaaacttccgcctcccaggttcaagagattctcctgcctcagcctcctgagtagctgggattacaggcgccctggaccacgcttggctaatttttgtatttttagtagacggagttttacatgttggccaggctggtctcgaactcctgatttcaagtgatccacccaccctggcctcccaactcattaggtattttgcattgtctgctttgagagacagtcacccaaagtgatctttgtgtttcctctcttgtcaaatagatgcaccaaggagaaaacagaactttttttttttttttttgacaaggaatctcactcttgctcaggctggagtgcagtggcatgatcacggctcactgcagcctttgacctcctgggctctacccaatctcccacttcagcctttggagtagcttggactagcacaccactacatctggttaatttttgtattttttgtagagatgggggtctcactatgttgcccaggctggtcttgaactcctaggctcaagcgatctgccttcctcagcctcccaaagtgctgggattacaggcatgagccactgtgcccagcccacttcctctattcttcaaacatccctaaccaagaacattttttttttcctgagacagagtcttgctctgttgcccaggttggagtgcagtggcgcaatctcggctcactgcaacctccacctcctcggttcaagcgattctcctgcctcagtcggccgagtagctgggattacagatgcacgccacgaagcccagctgatttttgtattttttaataggaaaatgaaagaaaaagctcaatgccttctcttgtcctgccaccactaccccccaccacactcccaccccaaccccgggtggcccctgtgtgtacactttttctcttgaacttaaataaaataaaataaaatttaaaaaaccctaatcagcagcagtggtcaggggcgcacccactgcactccaaagaaggtctcatcagtgtttcgggaaggcaaaagtgtcccagtgaggttggtgcagagtgtgtcccctcgggccaggggcgtcaggcgctgggaggcaatggtacaaccttggtggaagctgagacgcagcaggctgatgctacgggaggcgggagagcagattcccacggccagggtggtggggtggtgcctggaggccgtcgtggaggagcagatggccagcgtcacctggatgtgtaccatgtagatgccatcacgatggatacgtagctgccccttgtccagctctggtccatgcaggaaggagcggcccagtgctgggcccccctgccagtatagcctggggtcctgctgaggtcctgggggcacagggttagagggatgagaggatggaggtttagggaaactgaggcacagggggtcatagagaaagtcagatatagagatcgagagttagagatcaaggaataggttggacgtggtggctcatgcctgaaatcctaacagtttaggaggccaaggcgggtggatcacctgaggtcagcagttcaagaccagcctggacaacagggcgagaccccatctctacaaaaaataaaaagtcagccaggtgtggtggtgcacgcctctggtcctggctactcttgggaggctgaggctggaggatcgcttgagcctgggaggctgagactgcagtgagctatgatcacaccactgcactccagccttggtcacagaaaccctgtctcaaaaaaaagggagggggatagaaggttagagatctaaagggaaggagagaggggtaaggggaaaggggtagagacagggagagagagacaccaggagagagagagacaaaaaaaaaaaaaaaaaaaacagaaacagacaagggtaaagatagagggggagggagagatatatagagagagaatgcagagagagagcaagagagagagtgtatgtgtgagagaggacgagagtgcacgagagagtgcgacagagagcatgagagagagagcatgagagagcgagagagtgtgtgagaggacgagagagcttgagggagagtgcacgagagagtgcgagagagcacgagagagcaggagagagtgcaagagacagcatgagagagagagagatcatgagggagagagagcatgagacagcgagagagtgtgagagagaggacgagagagcttgagggagagtgcacgagagagtgagagagagcacgagagagcaggagagagtacgagagacagcatgagagagagagcaagagagagagtgtgtgtgtgagagaggacgagagagcttgagagagagtgcacgagacagagtgtgagagtgagctcgagagagtgcatgggagagtgtgtgtgtgagagaggatgagagctacagagctcgagagtgcacgggagtgagcgagagagtgcctgagagagtgagacagacagcacgagagagacagcgtgcgcacgagacagcgcgcaagagagtgcacgagagaattccccaagggacgcctgctcgggtcacaccctgaacgccaataaaagctttggctcccaggaccctttttttttcttgctttccacccgctggttgagtgtgtgtctcagagagctcccctaccttcccgttggccctcttctctctaggatctttattttctttagagacagggtctggtcctgtcacccaggctggagtgcagtggtgcaatcatagctcactgcagcctcagcctctggggctcaagctatctcccacctcagcctcccgagtcactgggaggtggcatgcgccaccatgaccagctaattttcaaaattttgttctagagatggtggtcttgctatgtttcccaagaaacatagtctagaactcctgggctcaagcgatcctcccacctcagcctcccaaagcgctgggatcacagccgggagccaaggtcctcggctatatttcacgtgtttcatctcagcgtctcctgtctccgcaacttatctgactgacacacctgagcctcactctcctcctcactcaaggctctcctggagactggctatcttgttaggaaggaactgaacggggtcaaacaggagccccaagggtgtttaccaggctttgcaaatttcctgtaagagtgacacctggtcccctgtcacacacttaggcatgatatcatccaccagaagaaagagctgtcctgtgaaagacactgtcaacacctgtggccaccacccctggtgccccatcgatgtggggctggacagccactctccagaaaggggcctcaagaccaaattacaggaaaaatatggcaaaggccggggagggggggaagatatatcaggggtcagagacccaaggagaagagagagcaacaaaggtcccttccattacaaaatggaaggaacaaaacacgcaagcgtgcagtaattttagtctctggggatgaaccgtggaaaaacagaagaggaagaagcgttcgagagaggctgggaggaggtagagacttccacctagagcagaactgttcatttcttctccctcaaggcttcttgccaatgccacccactcagataccacccccccacccgaccgccgcgactccactttaaatgaaaatccccaaccctggcatgcccggattccccacccacctccttgcctgattttttctctaaaacctgctcttggcctgttttactctacgtggcattgctctgtttttcacatgttcgtttttatttttttggtcatctcctcctcggtaggagtgatagtagaagggaagctcaccaggcagggatttctgtctgttttgtgcgcgactgcagtaccggaacagtgcctgcccactgcagatgtataattagtgcttgtagcatgaatggaggaagggtagcctttcctgtgagcgttttcgtttactaacaaaacccctttgattcttccaagggaggagatcgaatgtgaaggactgagagggaaagggagagaaaggtagtggatgcccagaaacacaaacctgctcgctctctctctcctctctctctctctcgttctctcccttttcctttttctcttgggaatgatctctttctcccccgccctgtttttcttcttccccctctctgtctctgtctcttcctctctgttattctccttctcttttcctctctctggctttctttcttttctttctcttatttctttttttctctttcttctttctttttcctttctctctctctcacctccctccctctctccttccttccttcttctctttcttttccttccttcctttctttctttttcttttcctttcttctttttatttatttatttgacagaatctccctctgtcacccaggctggagagcagtgccattatcttggctcactgcaacttctgcctcccaggttcaggcgattctcctgcctcggcctcctgagtagctgggattacaggtgcctgccaccacacccggctaatttttgtaattttagtagagacggggtttcaccatgttggccaggctggtctcaaactcctgggctcaagtgatccacccgccgcgccctccgaaagcgctgggattacaggctccagcaaccacgccaggtcgcctctctcgtttttattctctcttcctctatctgtcttttttctctttctccgtctctctccctctctctcgttctgtctcccccgcctgtctccctccctccctcttccactctccctgcgtctctccctgtttctttctttccccttcttctcctgtcccgtctgtcccctctgtccctctctctgttcttttttctgtctctccctccctttctctgggcctctccctccctctctgtcttctctctgtctccccctctccgtttccctccctatctctccctccctctctccctccgtctctgtctgtgtctctttctctctgtctctccccacttgtctttctacctctccttccttctctctctgtgcctcttcttctccccgtccctccacgtcccccgtgttacctgtgtgattcagctgcagctcagctacgtcccactggaagaaaagaccagaaaacagggcacggacgtaagcagagaggttctatgtgtcccctgtgccaggagctctcttttctctgtccatcctcctttccacctctcatcccacggcgcgcactggtgattttatttcattttatttttttttactcttaagacttcttaaagaggaagcaggtctgaaccagcggggaacgtgaagtcgagaccttcaaaagaacttcttcgtttcccgaatcgttttcctggatgtcactgggcgcgagagcaccgcgcgcagcggactctctacgctgcaaaggcgcccggcgcggtccccaaagggacccctcccccacccggagcgagtggctggggccatcccgtcctaggaggccccaggaagcccccacgcccagccttgtgaagcccccagcagcctctgagtcagcctgccgggggaacaccagagccgagtcatcttccatttccatgtgtgcctacctttcccatcccgggatctccctgtacctcctggcagggctgcctgtctcgtagcccctacaccgggcagcctggtccccgcctcgcctccctgttctggtctctgtctctgccctaccagatcttcctctctggcctctttgtacccatctcattctgtcttttcggtcacgcgcctctctatgttttcttcccaacttttccatctcaactcaccccaagtgactcgagcggcagctgctgctgagcctgtgcgaagcgctggatgcacaccacgaggcagatcaccaagcccgcgaccaatgggaccaaagcagcccgcaggacgcacccatagggcctgcgccgcaccgagcagcccgaaccctcctccggcatcgccgcggcgatcacctccgctagcgcaggaggggcgatgggggcgcggagcgctgccgagaaggaaggaaggaaactgcagccccctcccggggctcctgggcgtctacttgcttcaacctgtcaggggaccagcctgcccctctctggggatgtccggccggtcgaggggagggacttgagcaattggcgaggggaaattccctccaaccgctgccagtctgaagatcctaaagtgggtggaggcagttgccaggatgcaggcagtggccccgggtgagcctcagagttgcctgcccccaacccctccccgcccgaccttcaggcaggagacattcaatcttcctattcccctctccacctcattcttctggggcccattcatttattcaacaaacctccactgcacatttattagggattagattgtgctgtgcactggggatacagcagacatccaagaattgggggtgctccccaaatattcgtgtacccctctcctgcatttttttgatttgttttgtttttgagacggaggtctccctctgtcacccaggctggagtgcagtggcgccatctcagctcgccgcaacctcgatctcctgggttcaagcgattctcctgtctgagcctcgcgagtagctgggagtaacatgcgcgcgccaccatgcctggctaattttttgtatttttagtagagatggggtttcaccatgttggccaggctggacttgaactcctgaccttgggtgatccacccgccttggccttccaaagtgctgggattaaaggcatgagacactgcacccggtcagttatctcctgcattcttggagaccacctgcttttttgtttaaagttaaattaagttaatatttttattttttatttttattttattttattatttattttttttttttttgagacagagtctcgctctgtcgcccaggctggagtgcagtggcgccatctcggctcactgcaagctccgcctcccgggttcacgccattctcctgcctcagcctctcaagtagctgggactacaggcgcccgccaccacgcccggctaactttttgtatttttagtagagatgggttttcaccatgttagcgaggatggtctccatctcctgacctcgtgatctgcccgccttggcctcccaaagtgctgggattacaggcgtgagccgccgcgcccggcctaaattaatatttttagagacagagtgttgctctgttgcccaggctggatgcagtggcgccacacagctcacagcagcctcaaactcctgggcttcagtgaccctcccatctcagccttttgcatagttgggtctaccagcacacgctaccatgcccggctaattttttttttggggggggtagaggatagggtgttactatgttaccaggctggtctcaaacatctgggctcaagcgatcctgctgcgtaggtcccccaaagtgccgggatgacaggtgtgagccaccgcatccagcctcctgctgctgttctcgatggctgtagtgggttaacggtgtcctcccagaattcatggcctcctggaactgcagaatatgacctcattttgaaattacggggttttttttgcagatataattaggcttaaatgaggtcatactggattagagtgggccctcaggtggagagaaaagaggctcatagagaaggagccgtgtgaaaacagaaacagaaactgaatgaggcagatgaaagtcaagaaacaccaagaaggagccaggcgcagtggctcacgcctgtaatcccagcactttgggaggctgaggcaggcggatcacttgatatcaggagtttgagaccctcctggctaacacggtgaaacccccgtctctactaaaaatacaaaaaattagccgggcatggtggcgggcgcctgtagtcccagctactcaggaggctgaggcaggagaatggcgtgaacccgggaggtggagcttgcagtgagccgagatcacgccactgaactccagcctgggtgacagagtgagactccgtctcaaaaaaaaaaaaaaaagagttggagaccagcctggccaacatggtggaaccccatctctactaaaaattcaaaaaatagctgggtgtggtggtgggcacctttaatcccagctactcaggaagctgaggcaggagaatcgctcaaacccgggaggcagaggttgcagtgagccgagatcacaccattgcactccagcctgggtgacagagcgagactctgtcttaaaaatatatatattttttaaaaagaggatccagcctctttttccggctggaaccatggagggtgtagaagagaagaagaaggaagttcccgctgtgccagaaacccctaagaaaaagcgaaggaatttcacagagctgaagaccaagcgcctgagaaagaagtttgcccaaaagatgcttcgaaaggcaaggaggaagcttatctatgaaaaattgaagcactatcacaaggaatataggcagaggtacagaactgaaattcgaatggaaaagatgtcaagaaaagctggcaacttctatgaacctgcagaatccagactggcgtttgtcatcaggatcagaggtatcgatggtgtgagcccaaaggtccgaaatgtgttgcagcttctttgcctttgtcaaatcttcaatggaacctttgtgaaggccaattaacatgctgaggattgtagagccatacattgcatgcgggtacctaaatctgaagtcagtaaataaactaatctacaagcgtggttatggcaaaatcaataagaaacgaattgctttgacagataacgctttgcacgatctcttggaaaatatggcatcatctgtatggaggatgtgattcatgaggtccatactgttggaaaacgcttcaaagaagcacataacttcctgtggtccttcaaagtatcttctccatgaggcagaatgaagaaacagaccacccatttcgtggaaggtggagatgctggcaacagggaggaccagatcaacaggcttgttagaagaatgaactatggtgtgtactataattatttttctaagctgttcaataaacattacctgctctcaaatggaaagaaaaatatgtctgtatatacatacagttagggtcccaagggcctctggctatgaatcatcaagaagtcagtgtcatcagcagcaaactcacagccaacagcgctagaactcgtgcctggggatagcttctctaacacgtggatttcctcctctgtgaggctcatcacggcctccttgctcttgggggacattagacagggcttcagcactatttgggggctgtttgaaacagcaaaattaccaacaaaaagcaaaaaattgaaaggagataaaaatgggagatttcagagcctgagcctatagcatttgctgggtgggtgaagagggtggtcaaagaggtccagaattttgaggtatccagaaatcaaaatatcctccctgagatccccaagtactaaagggatttccttcacggaagccctaggactccaggtctgggggaagcgggtagacagcaccttcaagacaatctcctaccttaatttatttaatatttacttagctgatctttttatcagcttaagatataaatagtttagattcatatcattaagaaataactaataccttctaaaagatgggggaaagagagatggggtggggtggctcatacatgtaatctcagcactttgggaggccgaggtgtcttaggaaaatcccaaaatgagacaggagcagccaactcataaaaataaatacaactgcttggccgggcgcagtggctcacacctgtaatctcagcactttgggaggccgaggcgggcggatcacaaggtcaggagttcaagcccagcctggccaatatggtgaaaccccgtctctactaaaaatacaaaaattagctgggcgtggtggcggacacctgtagtcccagctatctcgggaggctgagtcaggagaatcgcctgaacccgggaggcggaggttgtcgtgagctgagatctggccactgcactccagcctgagagacagagagagagtctgtcttaaaaaaataaataaataaaaaaaatacaactgcttatgaaactgaatctcgttcaccacaagaaaattggaaattgaaagctccgtgaaacacaatttttctttctctctctctctctctttttttttttaagatcgtgtctccctctgtcgcccagcttggagtgcagtggcgccatctcggctcactgcaatctccgcctcccaggttcaagcaattctcctgcctcatcctcctgagtagctgggattacaggtgcccaccaccacgcctggctaatttttgtatttttagtagagatggggtttcaccatgttggccaggctggtcttgaactcctgacctccagtgatctgcccacctgggcctcccaaagtgctgggattacaggtgtgagccactgtgcccagccacactttatcttgtcacctgtgatttggtaaaagatcagagtgtttgatgattcactgctcagcaagtgcgtgggtgagaaggagcctcaaacctggaggctaggagctgaaatggatccaactttctggaaggacagcttgttgaaatctatcaatgcaccaaaatgcaccttccctttggtccagaaattttacttcaaggatattctttcgtaagcacacttgcacgcgtcacagacgcggacgtacgcacacaaactcaacgtggtgtggtttgaatgataccggaacacaaccaaccagaagacccatgcgcaattgagggtttagtcctgtgctaagcacttgtcaggtttcaccttttctgaccttcccaagaaccctatgaagtgaatcatgctgttatttctattttccctgtgagcaggctcagagaggaaggccaccagcttaatccacctagcaaggagcttgggagaggaagtgcctagatttgaatgtggatccatatcgtgtacctgaagaacctggaccttcccacctgagtcacttagtgacttgacctggcctctgaccactttccagtctgtgcagttctgctggaggtcatttgcaccattttttattttttaatttttatttatttatttatttatttttgggacgcctttctctgtcacccaggctggagggcagtggcgtgatctcggctctctctgcaacctctgcctcccgggtttaagtgattctcctcctgcctcagcctctcaagtagctgggattacagatgtgcaccaccacatccggctaatatttgtatttttagtagagatggggttttgctatgttggccaggctggtttcgaactcctgacctcaagtgattcgccaactttggcctcccaaagttctgggattacaggcatgagccaccacgccccacggtcgtgtgcattatttttgagaagaaggttttctaaaaccagagtttccccatctgcagactctagagctgaggctccaggacaagacgtccactgatgttggcactctctctctctctctctcttgctctaagtcaggggaatcatgagccctgtgaagggaaagagttgaggggagagacccagaggacagttggagcacagaaagtaagatcactttcctcctgaggaagcccgaggcccaccaggctgatttttggctgccttctgctttcccccaagggaaatctggaaacttctgcctctcttccataaccctggaagccgcgggcagcttgaaagtgccaactcaggcttcctctttgtccaacttggtcactccttctgtttccctttgctgtggctgatctcaagttgccacagggatatgccccttggtgttgatataggaattaaaaaggaattactggctgggtgcagtggttcacgcctgtaatcccggcactttgggatgccgaggtgggcagatcacctgaggtcgagagtctgagagcagcctgaccaacaaggagaaaccctgttaagggaggagaccacccctcatattgtcttatgcccagtttctgcctccaaagaaagaaaaagtaaaaacaaaaaggcagaaaggaaatccacaagcagaaagcccagcacctcaccctgggcctggtagttaaagatcgacccctgacctaatcggttacgttatctatagattacagacattgtagagaaaagcactgtgaaatccctatcctgttttgttccgatctaattaccggtgcatgcagtccccagtcacgtacccgctgctcgctcaatcgatcacgaccctctcacgctcacccccttagaggtgtgagcccttaaaaaggacaggaattgctcacttgaggagctcggctcttgagacaggagtcttgctgatgctcctggccgaataaaccccttccttctttaactcggtgtctgaggagttttgtctgcggctcgtcctgctacatttcttggttccctgaccgggaagcgaggtgattggcagagggtcgaggcagctccttaggcacttaagcccgccctgtggaacatccctgcaggggactccgaccagcccgagtggcgcggatcctgagagtgcttccgggtaggcatttgcgccggtgggacgcctcgccagagcagtgtgtggcaggcccccgtggaggatcaacgcggtggctgaacgccgggaaggaacgggcacttggagtctggacatctaaaacttggtaagactagtctttgaaacttgcccactccgtttgagtggaagcgtggcctgatcacccacggcatgcctgtaccggcactttggttttggttttgacttggtttgaattgcttgacaggattggtctcaggaacttgcccactccatttgagtggaagcgtggcctgatcacccacggcgtgcctgtactggcactttggttattgtttttgacttgacttggattgcttgatactttggttttggttttgacgtggcttggatatctggatactccgattttggttttgattttggtttggtgcaaactgcaaaagtgtgtgtgtgtgtaccctttttacccgttctttgttttgtggtgtgcgtgtggtgtgagcgtggtgttttgtctcgaagaagcataggtcaggcaccaataagcccaccctactaggaactaggttgaaaattttcaaaaaaacatttaaaggagactatggagtactatgacaccaggaaaacttaaaactttgtgtaagatagactggccagcattagaggtaagttggccattagaaggaagcctggagaggtcctctgtttcgaaggtatggcacaaggtaatctgtaagccagggcacccagaccagctcccatacatagacacttggttacagctggttttagacctcccgcccccaacacacagtggttgagagaacagtagcataagtggctggcagaggcaaggaaagaccagcagagagagagaaaggaaagagacagagaggaagagacagacaaagagggagtcaaggagagagagagaaagaaaaaaaaagagagagaaagagagaggcagagagagagagaaagagacagaggcaaaaggaaagtcaaagagagagtgacaaagtcaaagagagaaagaaagaagatgatttaacattaaccactgaaaattccattcactcagcaggtttcctaacaggggatctaaatcttaattaccaaatacgaacgtctgaccagacgtaggaggaactcccttcaggacagcatgaatgatggttcctcccgggtaattaaaaaaaaaaaaaaaaagccatctataccaattctaatttagagaaaacaaggtcttatcaatagcaaaggataattaaaatcccgacttacaaggttttcaacaaaagtaaagtttgctaaaagttaacagtttaacatgtatgacagtaacttctatgcttctggccttagacagtctagtccacagacataaaaaaaggttcgctttggaaaagaatggttatcatcttcgagaaaaaaaaaaggaaaaaaaaaggtggggcagaatttatataaaaagagtattatatggtaaattcttgtcttgaaataaattaactggttgtttaaagaaagaaatgtttgtagtaagtccgaaagttaaggcatgtcgaaaaattgcctgtaaaagttgtgaaagaaaaataagttataaaaatagtgttaaaaaaagaatttatgcaaaaaatgttgtataatttaaaagtaactaggcctcctgaatgtaaaactattgaaaaaaaaaacagtttatgtgcaaggtgtataagaaaagtaaaatatacctttagtaaaaggattataaggaggcataagagtgtacatttttacctacattaaaaagttaagttaaaaaaattattgttttgaagatttaagcaagttttaaaacgttaattgtaaagaaaattctgtgtgtaaacatattagctaaagttaaagaactatcacccagtttttctggacattaaagtaaaagcataacaggtttttcttaaaccaccaacctgctctttagcaaaaattataaaaggttgaaaagagtctataaaatcataccttatagtcaaacattaaaaattagataaatatgtctacaaggttttattaaaattaggtttaacattaataacacactaatataaaaataaaatttagcttatctggtataaaaatcatacaaaaagcattattaaacataaaatagtgtttagatttctttggtctaaaaactaataaaaataggtgctgaaggaaatttctcagtaaaaaggcactaaggactataaagtccactgccacagtccccacatttaaaacaaaaggtcaatttcttagaaattatatacttggtttatcttccactttcttttctctcaaaaagtaatatgaggggctgtcccctcccttaacagggtttctccttgttggtcaggctgctctcaaactcccgacctcaggtgatccgcccacctcggcctcccaaagtgatggtcttgtgtcatttaggccaattagataaaaaaaaaaaaaaaatgaaaaggatccagtccaccttcagaaaggaaaaaatggctcttcctgtactaaaggacaatgtaaccccttagagctagtactaaccaatccccttgatcctcgctggaaaaaagaggaacgtgtaaccctaaaaaattgataagagctagactggatcttcaagtaaatatcgtggtttgagaaaaagtgtataaatgctctcccgagccagtatttcaaaccttctatgataaactaaaagtgccagtaccagaaattccatgaaaaacaagaaatttgtttttgcaattagccgagcatgtgacccagtctctcaatgtcacttcatgttatatatgtggaagaactgtcacaggagatcaatggccataggaagcacgagaattagtacctacagacccagttcctgatgaattcccagctcaaaagaatcaccctgataatttctaggtcctaaaagcctcaattattggacaatatcgcatagctagagaaagaaaagaattcactcaccccgtaggacgatttagttgtctgagacagaaactgtataatggtaccacaaaaacagtcacttggtagagttcaaatcacacagagagaaatccacttagtaaaaaattcccaaagttgcaaaccgtgtagacatagccggagtcccaccgggactagacagccccgactagattatgctacgtatgtaggcatagagcttatgccaaattgcctaaccagtaggcaggcagttgtgttattagcactattaaactatctttcttcctactgcccataaaaacaggtgaactcctgggcttccctgtctatgcttccctcgaaaagagaagcatagctataagaaattgaaaaaatgataaatggcccccgagagaatcatacaatattatagtcctgctacttaggcacaagatggctcgtgaagatactggactcccatttacgtgatcaaccaaatcatatggttacaagctgtcttaaaaataatcaccaataaaaccggcacagccttgaccattctggcccagcaagaaactcagatgagaaatgctatctctcaaaatagattagctctcgactacttgctagcagctgaaggagaagtctgtaggaaatttaaccttactaattgctgcctacacatagataatcaagggcaagtagttgaagacacagttagagctatgacaaaactggcacatgtgcccgtgcaagtgtggcataaatttgatcctgaggccatgtttagaaaatagttcccagcgctaggaagatttaaaactcttacagtaagagttataatagtaataagaacctacttactgcttgcttgtttgctacctgtacttcttcaaatgataaaaagcgtcatcgctaacttagttcaccgaaatgcttcagcacaagtgtactatatgaatcattattgatctgtcttgcaagaagacacgggtagtaaaaatgaaagtgagaactccagtattgagcgagagtctcaaaagggggggataagggaggagaccacccctcatattgtcttatgcccaatatctgcctccaaagaaagaaaaagtaaaaacgaaaaggcagaaatgaaatccacaagcagacagcccggcgccacaccctgcagcccccagtcacgtaggccctgcttgctcaatcaatcatgaccgtctcacgctcacacccttagaggtgtgagcccttaaaaaggacagcaattgcatcctcgaggagctcagctcttgagacaggagtcttgccgatgcccccggccaaataaaccccttccttctttaactcggtgtctgaggagttttgtctgcagctcgtcctgctacactatctctctaaaaatacaaaattagctgggcgtggtggcacatgcctgtaatcccagctattcgggaggctgaggcaagagaatcgcatgaacctgggaggtggaggttgtggtgagccaagattgcaccattgcaatccagtctgggcaacaagagcgaaactccgtctcaaaaaaaaaaaaaaaaaaaaaaaagagagagagaaggaattacttaggcagagagcaagggcatgggagtcctcggtaaggcttttctttttaatgaaaagcagccccaaatcattttctaacaaacagcagcctgcaagctgggagcttgcctggatgaatgccagcgggaactaaggactagatatattgaagatggcggctctatcttcccttctctgccagccacgtgtgctgtaaaggagcagacaagatggcacagatcaactagaaagcctatttgcttaagaagggtaggctggggcagcggggtgctgtggctcacgcctgtaatccctgcactttggaggccgaggcgggtggatcacctgaggtcaggagttcgagaccagcctggccaatgatgaaatccaaataatagctgggcgttttagtgagcacctgtaatcccagctactcgggaggctgaggcaggagaatcgctcgaacccgggaggtggaggttgcagtgagccaaggtcacaccactgcattccagcctgggtgacaaagtgagactccatctcaaaacacacacacacagaattagggtggggcaaccagccttccctgcacactatgtagacgtcatatctaatcaaatcaatctgtgagccctgtgtaaaacagacaccgccttctctagcctgcctataaaatctgctgtggtctgctggctccccttttttcggatctctctctctctctctctcagctcctctctgctctcttttctttttttttctttgatatggagtcttgctctgtcactcaggctggagtgcagtggcctgatctcagctcactgcaacttccccctcttgggttcaagcaatcctcctgcctcagcctcccgagtagttgggattacaggcgtgcaccaccatgcccagctacttttttgtatttttaggagagatggggtttcgccatattggccaggctggtcttgaactcctgacctcaggtgatctgcctgcctcagcctgggtcccaaagtgctgggattacaggcgtgagccatcccacccggccctctctcctttcttctattaaactttccactcttaacccactcacttgtgcctgtgtcctgaattctttctctgcacacgtcaaagaaccccagggtatataacccagacagcgtagcgggttcagtgttacccttggcagagttctaacaggaaaaggacagggatccttcaacttacagcttcccgcttaactatatagcatgcctctcactgctgggatttctgctgggagggagggtatcaagacacttttgtctcagcacttctcactcttccattcctgttcctttctttctttttcttttcttttttttttttttgagacggagttttgctcttgttgcccaggctggagtgcaatgatgcaatctcggctcattgcagcctccgcctcccaggttcaagggattctcctgcttcagccccccagtagctgggattacaggcgcccaccaccatgaccagctaatttttgtatttttcgtagagacggggtttcaccatgttggccaggctggtctcgaactcttgatctcaggtgatccacccgcctcagcttcccaaagtgctgggattacaggcgtgaaccaccatgcccggctcattcctgttcctttctttatcccatgagccagcaggactaggagaattctgtgcaaaaggaagcaacaagaaacaattttcacctacatgaaagtctgggctggcatgtcatctctgttctgcaaaatctttaggagccaaaattctttcactgaagtgcctccgacacatcaaaggtgatgcccttgtctgcaaagtacaaagtgacacaccaccatggctgagttccaggaaacaggaaggtcaaaaagtgaagggaagcaactatccttccttttcaaggaagtgcttgcgctaataaattccgcttacaacccattggccaggactttgtcacatgactcaggcaagggagactgggaaatgtagtcttcattctgattagccatgtacccagctgaaactccagggttctattactatcagtaacagaattttgtgcctcaagtgcaaatttcaagggggcatctcaaactgtcattgtcaaaataaatgatattctcaggcaacattttaaaaaaaatctaaaaagtgaaggtcaaaaaaattcatgatgaacaaattgcaaagatgttttaaagatcagatccaaccctacacttctacaatctgcttcatttttttccaccttcattctggtcttgcagcccaaatttgcattctggctccaacacttaccagctgtgtgacctgcagcaagtgatttaacctctctgtgcctcagttccctggaagtaataaaagtatctcacaggcttgctatgaggttggaaggaattaatatttgtaaactgtttagcaaagagccagtacgtagtaaggaactggtgagaactattactatcattgctactactgaaacggcctccttgtctggagtaacacccgaggttcacagtctcacagccaaggaaaacaaggacatagacatagaaagagtgaggtcgagaatggaagtttcataggcgaaagaaagaggagagctctctgctgcagagaggggtcccggaaaaatgggttgccgtatcagcggggaaatgtagggggttttatagagaagctagtgagcaaacggtgtttgatttatatagggtgtgaaaaactggttagaccatgtgtcgcatttgcatagggtgcaaatttctggtagcctctgaccctaatcttttattatgcaggcaggttctctgcccgagctgcgccatgttgcccatttctgttactgcacgcgtggtaacataaaagggaagaggaagcgtccatgtagggcctgcctggcccctgggtagctctcttctattggcgcacctgccggcattctcccgtgtaagcttccagctgtgcctatctatgtttgcagctcaatttttcaggctgctgcttgttagaaaagaaatgatttgggggctgctttttgttagaagggaagctctgccgaggactctgctgccttcactatctgcctaaataatttctttctacctcctgtatcactacgactgttgctattattaatctgagaaagagactcactctgttgcccaggctggagtgcagtggcctgggctcactgcaacctccgcctcccagggtcaagtgattctcatgcctcagcctcccaagtagctgggactacaggagcctgccattatgcccagctaatttttttgtatttttagtagagacagggtttcaccatgttggccaggctggtctcaaactcctgacctcaaataatgtgcccgccttggcctcccacagtgctgggattacaggtgtgagctactgcgcccggcctcttattattatttatttattattattactgcttttggagacagggtcttactctgtcgcccaggctggagagcagtggtgcaatcatagctccctgcagcctccagttcctgggcttgagtgatcctcctgtctcagcttcctgagaaggtgggactacaggcatgcaccaccacactcagctattttttttttttgagttggagtcttgctatgttgcccaggctagagtgcagtggtgcaatgtcggctcactgccagctccgcctcccgggttcacgccgttctcctgcctcagccttccgagtagctggaaccacaggtgcccgccacctcgcccggctaatttttttgtgtttttagtagagacggggtttcactgtgttagccaggatggtctcgatctcctgacctcgtgatccgcctgccttggcctctcaaagtgctgggattataggcgtgagccaccgcgcccggcctcacattcagctaattttaaaagtttttggagagatgggctcttgctatgttgctcaggctggtcctgaactcttggcctcaagtgatactcccaccttggccttccaaattgttgggattccaggcgtgagccaccacccctggccagactttacacaataaaggtgtatttagggctgctctgcctatggagtggccattctttactcctttactttctgttttgtgtttgtttgtttgtttgtttgtttgagacggagttttgctcttgttgcccaggctggagttcaatggcgcgatctcagctcactgcaacctttgcctcctgggctcaagtgattctcctgcctcagccaccagagtagcagagattacaggtgcctgccaccacacccggctaattgtttgtatttttagtagacatggggtttcaccattttggccaggctggtctcgatctcctgacctcaggtgatctgccccccttggcctcccaaagtgctgggattacagctgtgaggctaacactcctggcctattcctttactttcttactaaacttatttcacttaaaaaaaaagtttattttctactcacacaacattcagatcagcaaggggttctgcccatggtaggctgaaataggcttcttccttttttttttttttttttgttgagacagggcctcactctgttgttcagggtgcagagccgtagcacaatctcggcttaatgcaacttctgcttcctgggttcaagtaatcctcctatttagtcccccaaatagctgggaccacaggtgcacggcaccatgcccgactaattttttttttttcattttcaacaagtgttttgtcaccaaacattaaaaacctacacaaaatacaggccaggtacagtggctcacgcctgtaatcccagaactttgggagtccgaggcgggcagatcacctgaggtcaggagttcgagaccagcctggccaacatggtgaaactccctctctactaaaaattcaaaaattagccaggcgtggtcatgtgcaattgcagtcccagctactcaggaggctgaggcttgagaattgcttggacctgggaggcggaggttgcaatgagctgagatcatgccactgcactccagcctgggtgacgagagccagacttcatctcaaaaaacaaaaatatatacagaatacaaagatagtataatagacttgtcacccaggttgaacagctactagtcatgccatgtttgcttcatctatactttgacccatttcctaccccccaatttattagttttttgggttttctttttagataaaatgtatacatattgaaaggtacaatctgaactgtaccattttgacaaattaatacactcatatagacttcccccctttaaagaatagaattactccacttactaatcattaatgtacatataagttacgtcgaagtagtatttacaatccaaatttttataaaataggtcagagttttgactgagaatttttttttttttttgagaccgagtcttgccctgttgcccaggctggagtgcagtggtgcaatcttggctcaccgcaacctctgcctcccaggttcaagcgattctcctgcctcagcctcccgagtagctgggattacaggcttgcgccacctcgcctgtctaattttttgtgtttttagtagagatggggttttgccatctttgccaggttggtcttgaactcctgaccttctgatccacccacctcagcctcccaaactgctgggattacacgcgtgagccaccgcgcctggccgagaatttttatttttaaaaaagtagagatctgtagagcacacagtaactacaatgtctatttatctcaagtaaatacagtttgatgaataaaattaaggaaaattcacctaagatgaaaaaaaaacaatcaaaccatctgtgcaatatgctatctgtaggagcatttggttaagaataacaaactaacccaacaattttattattttaataaccaaaattggcacaaatttctactattgttttcatagaaatgctccctcacaataaaaaaattttcatatcatgagagcaaaaacagcaaatatttgaaaaagtagatgtcttataaaattaagtagcaaaggccaggcgcagtggctcatgccagtaatcccagcacttcgggaggccgaggcgggaggatcacctgaggtcaggggttcgagactagcctggccaacatggtgaaaccatatctctactaaaaattccaaaattagccagacgtggtggcgggcaggagaatcgcttgaatctgggagacagaggttgcagtgagccgagatcttgccactgtactctagtttgggtgacaagagcaaaactccatctcaaaaaaaaaaaagaaaaatcacagttacctataattcgatcattcaatcaatcatcagataactcagctcattcaattatctgcaagtgtagataattctcatagcttcctattaaaattatgttttatgcccttacaaattttaacttagtttttcttttatttatttattagtaggagtctcactctgtcgcccaggctggagtgcagtggcacaatcttggctctctgcaacctccacctcctgggttcatgcaattctcctgcctcagcctcctgagtagctgacattacaggcatgaggcaccacacccagctaatcccacagtgcagggattagaggcataagccacctccccctcctactttttcttcttacttggtccgagggctgtgggacggggccccaccccagcccatcaccagagacttttggtcttggccatgtgtcctaagacttaatagttcttgcacattctcttggtaatcaattcaatttgtttcttccaaatcttgcagtaaaactgatgttccagccaggcgctgtggctcatgcctagacggttttcatcttgacatgacccttgtgctaggagtgtaaagtagaaaaccacagatggatacacatcattgccagtcccttttcactaaccaaagcgtgtcagtgaccctgcttaactttagtgggtgcagggaagtggcatgcttgcaagagtcagaaagaaagctgaaaatactaggtggagaacacgaatcgctatcaaaacccacccatttgatcacagaaactcagctcatgctccttcctgcttgcaaaatacagtcacccctccaagagagaactccatagtcccacctgtaatggcatcaagcctctttttctttccatgtggtctgtgatcattcagtagcctagccaagcttttttttttttttaaaattactgaacatatatttctgagttcctgctgtttccaaggtattaatacaatagtgcagaaatcaaagttcctaccctcttggagattgcatttgatgagttcccatttgtgtcaggccaactttcttgcattctgtttttattttaaaaataaatatggtctcaaaaaacaaacaaaaacaacagcaacaaaatggtctcagttaatattccaacagccctgggagataagtagtattatcttgagatgccttttgtgaattttcagcaacaactagaattttaaaaacaatccatagatatttccataacgtacgtatatgaaaggacacagtgaacaatgataagaaaacttaggttttaaaaaggttaagtaccttattaaaggtaaaagctggccaggcgtggtagctcacgcctgtaatcccaaaactttgggaggctgaggcaggctgatcacttgaggtcaggagttcgagacaagcctggccaacatggtgaaaccctatctctactaaaaatacaaaaattagccaggcatgggggcgggtgcctgtaatcccagctacttgggaggccaagacatgagaatcacttgaaaccaggaggcggaggttgcagtgagctgagatcgtgccactgcactccagcctaggtgacagagtgagactctgtctcaaaaagaaaaataaataaataaataaaaataaataaataaagcaaagccaaaattcaaaactcaaactttattttgactccagagttccttttatacaataccttttcctctgaagtcatgccccagctgatatcacagtcaaaatacattttaaaggatgagtgggacagaggtgtaatggggaaaaggtactagtcaaaactttttaaaaaataggcttttatgggtgtggtggctcatgcctgtaatcccagcaacttgggaggctgaggcaggagaattgcttgaacctgggaggtggaggttgcggtaagccaagatcgctccattgcactccagcctaggcaacaagagtgaagctccgtctcaaaaaaaaaaaaaaaaaaaaaaagtctttttagagcagttttagtttcgcagcaaaattgagcagaaaatacaaaaagttcccacacacccctagagccccctgctccacaaacaatcccattgttaacatcccaccgcacccggccggctctgtgtatttgtcttcacttttttcccctgcttcttggatttgctaactttatggttgccttatcttcaagtttgttgatcttttttctacctactcaaatctgttcttgaattcgtctaatgaattatcacctccattattgtaactttcagctccagaattcctgtttgtgaatttttaataatttatttctttctattgacattctcacttctttcatatatcattctcatgatctgctttagttctttgtccatattttccttcatctcactgaacacattggagacagttgatttaatgtctttgactaatagtttcaatgtgtgggcttccctagtaacagtatatgttaaatcatggtttattgtaaatgagttatactttcctatgtctttatgctttgtaattacaactggacatcctgagtattatgattcataagtctggaactccgatgctccaagtcttcatggattgctgatttctgcttactgaaggctgaaactattcatttctgacttttcccgactgttttttggcaactgtgtatcctttgggtgtgatcactgaagtgtcttttccattttgtggtcagttagtaacatgacaaagattttacaaggcatcgaacctctaagtctgagggatacgaagggactcaagagagccaaaacaagcatcttattggcttctcaggaattgccagacctagtagagtgcaaattccccaaattttggaggccaaggtctcaactgcctgctctggcactggtcacctgtttgaggaaaatggactgtctccaaattgccccactcggacggaggaatggggagtgggggctggtttgtgaaggctgttctctttctaaagtctcagtctctcttttcatcaagcactcctctcattattataagtgctgcaacaggatgactagttctgaaatcattgattctgtgtctcctgcccctcagttcactgtttatttcactggagggaggggctcccagagctttctactccgtctttttgcttgatctcactgtttgctgactttctgagatatgcccaaactcatatggctattggaaatttccacattaaaagtacttcaccacattgggcaacatggtgaaatcctgtctctacaaaaaagaaaaatacaaaaattccttgggtgaggtggcacactcccgtagtcccagctacttgagaggctgaggtgggagaatcgcttgagaccgggaggcagaggttgcagtgagccgagatcgcactactgcactccagcctgggtgacagagtgaggctctgtctcaaaaaaaaaaaaaaaaaaaaaggtacttgacatgatagtttccaataaaaacattttaacctaattccttcatttcactctttagcaatcaatatgtgaaaattatattgaactggtaaaaatgcaggttacaaagataagataaatatgaaatgctatgatacacttctgaccactggaagacataagagagagttgcaatgattatatttaatattttggttagtaaacagagagaacgcatctacccagggattcagtaggggtatgtgaagatttaataaggtaagtaatccttagtttttgagaaaccagagatagaaaatatgttggtgatttttttttttttttgagatggagtctggctcttttcgcccaagctggactgcagtggtgtgctctcagctcactgtaacctctgcctcccgggttcatgccattctcctgcctcagcctcctgagtagctgggattatgggtgtgtaccaccacacctggctaattttttttcttttttgagacggagtcttgctctcttgcccaggctggagtgcagtggcgtgatctcggctcactgcaagctccgtctcccaggttcatgccattctcctgcctcagcttcccgagtagctgggactacaggtgtctgccaccacgcccggctaattttttgtatttttagtagagacggggtttcaccgtgttagccaggatggtctcgatctcctgacctcgtgatccgcccgccttggcctcccaaagtgctgggattacaggtgtgagccaccgcgcccggtcaattttttttttttaactttaagttccgggatacatgtgcagaacatgcaggtttgttacataagtatatgtgtgccatggcggtttgctgcacctgctgacccgtcctctaagttgcctcctctcacttctcaccccccaacaggcccgatgtgtgacgttcccctccctgtgtccatgtgttctcattgttcagctcccacttatgagtgagaacatgcggtgtttggttttctgttcctgtgttagtttgctgagggtgatggtttccagcttcatccatgtccctgcaaaggacacgatctctttcctttttatgactgcgtagtattccatggtgtataggtaccacattttctttatccagtctatcatcgatggacatttgggttggtgccatgactttgctattgtaaatagtgctgcaataaacatatggtgcgtgtgtctttatagtagaataatttatgttctctttttttttttttttttgagatgaagtctcagtttgtcacccaggctggagtgcagtggcataatcttggcccactgcaacctccaactcccgggttcaagcaattctcctgcctcatccttccgggtagctgggattgcaggtgcccaccaccatgcctggctaatttttgtatttttagtagagatgatatttcgccacgttggaccaggctggtctcgaactcctggcctcaggtgatctgctcaccttggcctctcaaaatgctgggattacaggcgtgagccgccacacccggccaggattgttattactacttttaacccatttcccatttgccccgagaatactcttgtctctaatcccaatgtaacatcatatacatttctgctacattaggattagagacaaattctgttcagaaataactccaagaacagtttttatattttatttgcacattgaaactcaaccagatttgcttcagcctcaacaagtgtgtttatgtaaagttaaatgaactctggcagtgagctgcacgttttttaaaattaggaaatgagttagctaatattgaacttgaggttttagtcaatgcaatgagacaaaaagattgaataggaagaaatgagtcattatttagagattacttcattatgtatgtagaaaattctaggccagtcattgtggctcacgcctgtaaccccagcactttaggaggccgaggtgggtggatcatgaggccaggagatcgagactatcctggctaacacggtgaaaccctgtctctactaaaaatacaaagaactagccgcctgtagtctcagctacttgggaggctgaggcaggagaatggcgtgaacccaggaggtggagcttacagtgagccgagatcacaccactgcactccagcctgggtgacagagtgagactctgtctcaaaaaaaaaaaaaaaagaaaattctaaataatctacacatagttttatttttacttttgagatggactcactgtgtcgcccaggctggagtgcagtggtgcaatctcggctcactgcaacctctgcctcccaggttcaagcaattctcctccctcaacctcccaagtagctgggacaacaggtgctcaccaccacacccagctaattttttctgtagttttagtagagatgtggttttatcgtgtaggccagggtggtctcaaacttctggtctcaggtgatccacccatctcagccttccaaagtacttggattacaggtgtgggccaccacgcccaacctacacatagttttttttttttttttttttttttgagacagagttttgctctgttgcccaggctggagtacagtggtatatcttggctcaccacgaccttctcttcccgggttcaagcaattctgttgcctcagcctcctgagtagctgggattacaggcatgcactaccacacccggctaatttttgtattcttagtagagatgaggtttcaccatgttgcccaggctggtctcaaactcctgacctcaggggatccgcccacctcagcctcccaaagtgctgggattacaggcataagccactgcgcccggcctacacatagttttaatatattgatttagcaacaacaccggaggcaaagccaaagtacaaaaataaatcatatttttatataccactgtcaactagaaaagacatgtaaaactatgtcatttacaaactcaacaaaaatatatcaaatacctgggactacatctaatggaagcactatataaattctacaccaaaaaccataaaatgttactgagaaaattaaagaaagcttaaataaatagaaggatataccatggccaagaggttggaacatttaataccatgaagacaccaattctacaccaatatctattgatctatagattcaatgcaatcccagtcaatacctcagcaggaagtatacgtgtgtgtgtgtgtatgtgtgtgcgcgtgagagagagagaggagagagagagagagagactgattctaataaaaacacagggaaatgcaaagaactaagaaagacaagatgatctgtaaaaagaacagaatggagagactctactatatattgagtcttattaaaaggctacagcaagttaaacagtgtggtattagtgccatcagggactacaatccagtgggattataaaaataattgcttggccgggtgcagtggctcatgcctgtaatcccagcactttgggaggctgaggcgggcggatcacgaggtcaggagatcgagaccatcctggctaacacggtgaaaccccgtctctactaaaaatacaaaaaattagccgggcatggtggcgggcgcctgtagtcccagctacttgggaggctgaggcaggagaatggcatgaacctgggagacggagcttgcagtgagccgagatcatgccactgcactccagcctgggcgacagagcaagactccttctcaaaaaaaaaaaaaaaaaaaaaaaaaaaaattagctgggcgtggtggtgtgcacctgtaatcccagctactcaggaggctgaggcaggagaatcacttcaacctgggaggcagaggttacagtgagctgagatcgtgccactgtactccagcctgggcaacagagcgagactctgtcacaaaaaaaaaaaaattctgtaaggcaaaaagaaaaagacaacctacttttaaaagatataaaagatgtgaagcaacacttcacataaaataatatacaagtggacaatactagagagcatatttagctacattactccaaaaaaaagtaaaaccacgtggaatcccccttattcaacagtggaaattggcaagactgggcatgactctgagagtgagtcaacaatgtggcaggatatgtttcgaacctttatcctttcacagaaacattcatttcaataatcttctgtgcagaaaaatactttcacaagagtcaaagaatcagctgagagaccacagaacttgaatggaaaataacggtaagaaaagataggccgagcatggtggctcacgcctgtaattccagcacttttggaggccgaggtgggtggatcacctgaggtcaggagttccaaccagcctgatgaacatggagaaaccccatctctactaaaaatacaaaaaaaaaattagccagacgtggtggacgcacctgtaatcccaggtactcaggaggctggggcagaagaatgtcttgaaccgggaggcagaggttgcggtgagccgagatcgcgccattgcactccaacctgggcgacagagcgagactccatctcaaaaaaaaaaaaaaaaaaaaaaaggcaaaaagaaagaaaaacaagaaaaagaaaagaaaagatgtactgaagatggtaggaaagagtttcacttgatctgcatcatccccttcctgaacccaaggcagcacagagagagaaacccacttcatgggggatggagagtaaagtgagttcctggctgcactgcagacctgagcccgagttccactttagcgaacacggatacaggctgtccagagaaaagcaagtggaaactacagaaactgttgtagaacttttacttgctggtctggtcttggttgtatccatctttggccagtcacatatgtactcaagaaaccttcccaatagagtacaacaggatgagactctgaaatccctttcaatattccctgctagatattgattgttatatcaagcattaagtgtaaacttttaatggacaattagtgtaactgtggatggcatctgcttttgtttttaattctgtggattgtgtttaagcaattcaatagtatgttcctgattttgagatgctaagtggtattgcacagatgtcattttatccagcatgtgcaacagtcccatgaagtttatagagcatacccttgtatagcttcaggtgctagaattaaaattgatctgttatcacacacacacacacacacacacacacacacacgcaatcattcatgtggactcaaactccagttccatcccaggggatccaggcaccaggtcagcccctgtggaaccaggtgccaagcctcctctcttgctgaaataggcaccaggcaatccctctcaaggactccagcgagaagtccaccagcaactccccaccaaacaggctgcctagaatctctagataggctgactggcaaagtgcttttcctgctaaagccagtatgtaaagaactgactacttcaaatgcacagacactaatgcaaggccataaggatcatgaataatcagagaaacatgacatcaccaaaagaacaaaataaagtatgagaaactgacacaaaagaagtggacatcaacgaactccagatgaaaaattcaaaataatcatcttaaagaagctcagtgaattataagagaacacagagagacaactgaatgggaaacaaaacataatgaaatgacaaattcaacaaagagatagaacctatatttaaaaaaggactaaaaagaaattctggagctgaagaaaacaaggactgaactgaaagtctccatgaagagcttcaacagcagatgtgatcaagaagaagaaagaatcagtgagctcaaaggcaggacatttgaaattatccattcaaaggagcaaacataaaaaagaataaataatactgaaaaagctcaataggcttatgagataccattaagtgaaccaatatatgcattatgtaagtgctccaaaaggagcaggaaaggtgaaaaggagagaaaacatatttacaaaaacaatgatagaaaaattttgaggccagccgtcgtggctcatgcctgtaattctagcactttgcagggctgaggcaggtgggtcacttgaggtcaggagtgtgagaccagcctggccaacatggtgaaaccctgtctctactaaaaatacagaaatgagctggaggggtggtgcacaccaatagtcccaggtacttgggagactgaggcataagaatcacttgaacttgggacgtggaggttgcagtgagccaagattgttccactgcactccagcctgagcaacagaatgaaactctatctcaaacaaaaacaaaaacaaaccccccaaaatttccaaatctggaaaaggaaaaatgaatatgaagatccatgaagccccaaaaaccccaaatagggttaaggtatagagaacgtcactgagacacattgtaataaaattctcaaaaatcagagataaaaagaatttgaaagcagcaagagaaaagcaactcatcatatacaacagaacctctattcaagtattagagattcctcagcagaaacattccaggccaggagaaagtgggatgatgtattccaagtgccaaaagagaacaaaaacaactgtcaatcaagagtactataacagcaaagctatcctttagaaataaaaataagtaaataaaaactttccctgataaacaaaaactgagggagttcctcaccacttgacctgcatgacaagaaatgctaaaggaaattcttcagtttgaaacaaaagaatgccaaataaaaatatgaaaacaggccaagtgtggtggctcacgcctgtaatcccagcactttgggaggccgagggcggatcacctgaggtcgggagttcgagaccagcctgaccaacatggagaaactccgtctctactaaaaatacaaaattagccaggtgtggtggcacatgtctgtaatcccagctacccgggaggctgaggcaggagaattgcttgaacctgggaggcagaggttgtggtgagccgagatcgtgccattgcactccagcctgggtaacaagagtgaaactccatctcattaaaaaaaaaaaaaaaaaagtaaaagtataaaactcactgtaaaggtaaatatagagtcaaattcagaatgctttaatactgtaatggtgtgtacagatcattttaaaccgtagaataaaaagcaaaaatattttaaaactatacagtaatgttaatggatacaaaatattaaaatatataaaatgtaacattaataacatataagagggaagtacaagtgtagagttttttatgtgatcaaaattaagttgctagcaacttaagatgaactgttataactataagatgcttatgtaaacctcatggtaaccacagagaaaaaacctgcagtagatacacaaaagagagacagaaagaatcaaagcttatcactaccccaaatcatcaaatcacaaaagacattaagagaggaagaaagaaatgaaggaactacaaaaacagtcagaaaaagatatggaaaacagaaatagtaattacctatcaataattatttcaaatgtatgtggattaaattctccaaccaaaatatgtaaagtggctgaatggattaaaaaaacaagagccatctatatgctgcttacaagagactaattttacttttaaggacatatatgggctgaaagtaaaaggatggaaaaagatataccatgcaaatggtagccaaaagagagaaggggtaactgtatttatatcagacaagattagcttttagtaaaaaactgtcacaagagacaaaggaggtcattatatagtaataaagaggtcaattcgtaaagatgatctgccaattataaatatatttgcatccaacattggagtttctattatataagcaaatattaacagatgggaagagagagatagatagcaatacatactaatagaggaatttgataccccactctctatgatagatagaacatccagacagaaaatgaataaggaaacagtagacttgaataacactgcagaccaaaggaccttgcagacatatatagaacatttcatcaaacagcagcagaatacacatttttcctccaaatacacatggaacattctctaggacagatcaagtgttaggtcacaaaataggtcttaacaagtttaagaagactgaaatcatatcaagtatgttttctcaccacaatgatacgaaactagaaatcaaaataggaagaaaattagaaaatgcactaatatatgaaaattaaacaacacattcctgaacaataaatgagtcaaagaagaaataaaaagagaaataaaagagtagcttgacaatacaaaaatggagaaagactgtatcaaaatttatgggaggtagcaacagcagttttaagagtgaagtttatagcaataaatgcctacattaagaaaagagaggccaggcacgggtggctcacgcctgtaatcccagcactttgggaggcctaggtgggtggatcatgaggtcaggagtttgagaccggcctggccaatatggtgaaaccctgtctctaataaaatacaaaaattatccgggggtaatggcatgcacctgtagtcccagctacttgggaggctgaggcagaagaattgcttgaacccaggaggcggaggttgcagtgagctgagatcatgccactgcactccagcctgggcgacagagtgagactccatctcacaaaaaaaaaaaaaaaaaagagagagagagaaagagagagaaaagaaagatctcaaataaacaacctaagtttatacttcaaggaaatagacaaattaagcaaaagttagtagaggaagaaaataacggagcaataaataaataaaatcgagactacaaacgcaatagaaaagatcaatgaaactaagagctggttttataaaaagataaacaaaattgacaaaactttagctagactaagaaaaaagagaggagactcaaaatcagaaatgagaggacacattacaactgatactactgaaatacaaaggattataagagactattatgcacagttatacaccaacagattgggtagcctagaagaaatgataaattcctagaaacacaaacctaccaagtctgaatcatgaagaaattaaaaaagatctgaacagaccaataataaattaggagatggaatcagtaatcaaaagtgctccaacaaagacaagtctgtggccaggtggcttcactggtgaatttcactaacctttaaaagaaaaattaacactaatcttctcaaactattcaaaaaattgaagaggtgggaatattatcaaactaattttacaaggatagtattactctgataccaaagccagaaaaagcactagaagaaaagaaaattacaggctaatatcccttagaaacacaaatgcaaaattctcaacaaagtactagcaaacctaattcaacagcacattaagaggctcattcaccatgatcaagtgggatttatccctaggatgcagggatggttccaaatacagagattaataaatataatacaccatattaacagaatgaaggataaaaattatattatcatctcactagatgcagaaaatcatttgacacaattcaacatcctttcacgataaaagctagcaacaaagtaggtatagaaggaaggtatcttaacataataaaggccatatatgataagcccacagccaacatcatactcagtggtggacaagtgagtccactctcaccacttctattcaaaatagtactgaaagttttaggcagagcatttgggtaagggaaagaaagaaaagaaatttaaattggaaaggaagaggtaaaattacctctgtttgtagatgtcataatcttatgtatagaatttttttttttttagatggagtttcgctcttgttgcccaggctggagtgcaatggcattatcttggctcactgcaacctccacctccttggttcaagtgattctcctgcctcagtctcccgagtagctgagattacaggcatgcgccaccacgccgactaattttgtatgtttagtagagaccgggtttctccacattggtcagggtggtcttgaactcctgacctcaatgatccgcctgtttcggtctcccaaagtgctgggattacagatgtgagccattgcacccagcctagagaatcttacagatgccacaaacaaatctcttagaattaataaacaaattcaattgcaagattcaacatcaatgtagacaattcagtgtgtttctacacactgacaacaatctatctgaaaaaataatcaataaagcaatcccatttaaaatagaataaaaaatgctcaggaattaatttatccaaggaagtaaaagatccgtttacaaaaaaaaaattgatcaaagaaattgtagaagacacaaatgaatgaaaagatatcccatgttcatggattgaaggaattaatattgttaaaatgtccatgctacacaaagtgatccacagattctatgcaaatccctatcaaaatttcaggggtatttttcatagaaatagaaacaaaattctaaaatttaaccacaaaagactttgaataataaacacaattcagcaagaaaaacaaagctgaaggcatcagttctggatttcaaactatattacaaatctatagtaatcaagacagtatgttactggaatgacagcagacacacagaccaatggaacagaataaaaagtccagaagtaaactcacacatgtacagtcaatgaatttcagacaaaagtgctgagaacacacaatgggaaaaggagagctctttgataaatgatgctgggaaaaatagatatccacatgcagaagaatgaaattagaccctcatcttgttactgaaacaccagggatatggtctaggtctgctgcttgccacacagaaagccaatggctgaggtgatgagtattgccagggaagaaggctttaattgggtgctgcagctgaggaggtgggagatcagtcttgaatccatccccttgactgactaaaattaggggtttatgtagctgggaagaaatgtaatgatgtgtgggaaaatgggaacttgggaggcataaggaagtaatcgtgatgaatgaggggtctggatgtgatgatctggtgagtttcagttctttgatattttttgagatgcctgggttggggtggggaggttccttcttgaagaagaagaaattcagataaaacaaacataagtttcaaggtttaagactggaagtgtccatttctatttatcaaaaacaaaacagtctatgggactattgggtcagtttcagtcccctctatttatcaatttttttaatcatggggaatctgaccattgatctttctggctgcttcatgctgaggaggtgaccatgtggccaccttctgaaacacaatcattctctgtccagccaccactgcccccaccaaagacaagtcaaagcaggatgaacctacctgcaaaataagcttcagtccatggctgggcatggtggcttctgcctgtaatcccagcagtttgggaggccaaggcaggtggatcacttgaggccaggagttggagacccaggagatggaggttgcagtgagccagtctgggtgacagagtgagactctgtctaaaaaataaaaaataaaaaagctttggtcccatatacttggcctgattacccccaaaaagtgcagcaaaaatcattgtccacatagatccttctaaattggccttgctggaacctcacactgttccattataaaagaaaataggttcttactcaaattatgccaagaaacacattgacatatcagaattttaggaatctcatacaatcctagaacatatattaacaactcatctatataaatataaccctaagggccaggcgtggtggctcacgcctgtaatcccagcactctgggaggccgaggcaggcggatcacgaggtcaggagtttgagaccagcctggccagtatggtgaaaccctgtctctactaaaaatacaaaaattagccgggcatggtggcacgtgcctgtaatctcagctacttgggagggtgaggcagaagaattgcttgaacctgggaggcagaggttgcagtgagccaagattgagccactgtactccagtctgggcgacagagtgagactccatctcaaaaataaaatataacccgaaggaagctaaacaccaccttggatctgacaatgtttcctgcatgattctaaaataacaaattaacctaagatatctctcttggacttgagggaacctaatatccaaaaaagttagtttgaggtcaaaaagactgaatttagacctttaaattgtgctcctagaaattttgccaattacaaaaattttaaaacacttgatatcacaaaacatgatcacaggtcacaataaaatagtcatttatggccgggtgcagtggctcacacctgtaatcccagcactttgggaggccaaggcaggcagatcatctgaggtcaggtgttcaagaccagcctggccaacattgtaaaaccgcgtctctactaaaaatacaaaaattagccaggtgtggtggcacgtgcctgttaatcccagctacttgagaggctgaggcaggagaactgcttgaacctggaggcagaggttgcagtgagctgagattgggccactgcactccagcctgggcgacaagaatgaaattctgtcccaaaaaaaaaaaaaaagaaaaaaaggaaaacacaagtcatttatttagccaaaatgataaaacaaaaatatttaccttttaataggagatacagtttctcaaacaataagacagcatgagaccaaacaaatctgtccctctccaatccattttttccctccagtttacttaaacaaaactattttctctcttattaatattatacaaattttgttcaaaagagaaaacccaaattttacctttatatggtgtatttattaatgttaaagataattttaataaaactttatcaataaatctatctaattttcattggtttgaccatagggtaagattttgataaactttttataagctttcatgattttctattaaaaagaacagatcaatgctccacaaaaacccttactcctgacacatgggctcagaccctcaccttgcatcagtgtgcttttgatattaacgtttaatttataagaaaaactctgaactaattttatccctcaaaattggcccttataatctcacacacccacctcatccgtgatagttcctgggcctagagggattgaatagttttggttttttttctttttttttttttgagacagagtctcgctctgttgccaggctagaatgcagtggcacaatattggctcattgcaacctctgcctccccagttcaagcgattctcctacctcagcctcctgaatagctgggactacaggcacccgccaccactcctggctaatttttgtatttttagtagagacgagatttaaccatgttggccaggatggtctcgatctcttgccctcgtgatccacccacctcagcctcccaaagtgctgggattacgggtgtgagccaccgcacctggctgaatagttttaatttctagccctgtgtctcatgaaaacagttcattttgattgtcatttttccctggatctgaagacaagacttccactggttttgatgttcaagacttagcaggggtcagtgcctttttcagacccaggagtcaaagttgtgaaacttaacagcacaaggattagttaatagggtatttatactaccaaaaggcctgtcattctaacatgccacacattgaaacgctgtgatttggtgtctaggagttactgcttgcagcacttcaaaccactgtattaaagtaatcaggttactcattgcatatgtccaattgctagcattctagtgacagaactgtgaccaaaagcataaaaaatgtggtaggtgctaagtcaaacttatcaaagtaagacaactacctttttccccatcattaaaaaaaaaaatagtaaatgcaggccacgcatggtggctcatgcctgtattcccagcactttgggaggctgaggcaggcagatcacttgaagtcaggagttcgagaccagcctggacaacatggtgcaaccccatctgtactaaaaatacaaaaattagctgggtatggtggcatgtgcctgtaattccagttactcgggagactgaggcataagaattgcttgaatccaggaggtggaggttgcagtgagccaaggtggtgacagtgcactccagcctgggtgacagaaactctgtctcaaacaaacaaacaaacaaacaaaacaaacaaaaaataccccaaaacaaacccacgtgatgaatattttgtttctgacacacaatttaatgtctttaagtccaccaataccactgtatgttttgtgcaattaagaaattcactttaggctcatgatcagtaagtactttagtgctagtgctatctatgcagaagaacaaatacagtgagaagcaaagcaagtctttacagaaaatttggcttcacagaaaatctggattcatacttaactatatgaaaaacggattgccaaattgccaatgtatttctttacaatatttcttaattttccttcatcaagactaagagctttaactatgaacaacattaattagccaaacttctccaattttctatcaggttttaaaggatattctacatctaaatattttaaactttgttttctctgtgtatgcataaaggcagacatacagagagagaggaaaaaaactacatatgacatacacagaccatctatgacatgcttgaaccttcagtttgttctaaatttattttcttattccctcccttccttccttccttcccccttcctttcttccttccttccttctttcccctgcctccctccttcctttctttctttctctttcttttcttttttctctttctttctctcttttctttcttcctttcctctttcttttttctttctctctctgtctccccctcccttgcatcccctcccattgtcttctttccttctttccttccttccttcctttcttccttccttcccagtcattttactttaagacaaaaattcaccatacaagatcctttctcatataaaattattccttttttttttttttcttgagacggagtctctctctgtcgcccaggctggagtgcagtggtgtgatcttggctcacttcaagttccacctcctgggttcatgccattctcctacctcagcctcccaagtagctgggactacaatcgcccaccaccatgcccggctaatttttttgtgtgtttttagtagagatagggtttcgctgtgttagccaggatggtcttgatctcctgacctcgtgatccgcccatcttggcctcccaaagtgctgggattacaggcgtgagccaccgcacccgacaaaattattctttctttataaccttccttaccaaaaatacatcttcatatccataattttcttcacatctcactcctttacttattggttcctttcttttcaagtccataatttgaattaacctttagataacttctgaatttgataataatttttttctcaataagaacatctcttctttggcatattttatatgcagaattatatattaactagaattcttatccttagtaacctcaaattttagtgaaaacctaggaagaaagaaatcctgagctacctatcagatattagcattttataatgagaactcttccataatttttagaaacatatttccccatatcataacccttccttaattagaaatgacccagacatctaataagcataattttaaatattattcttaaacataattttaagattttaagttacacaataagttcacctgcagcacttaacccatttacactttatttttagcagtttatatagattatttacacattattttcttgttaacccttttataacttgtgaatatcagatgttcacctaaataagaaccttaaagttaactgcatgggcattttcaccaataactcagtagactcaggtgttttcattaaaccaataacattaaatagtcttacttatataaaaaaaaacacaaaaagatcattttgttttggctgggtttatggtttgataaccttctatgccaaaccctgatacctcaaaatatctagaagagacaaatatgaaacccagagaaaaatgtatgctgacaattctgaagacatttctattcctattttaccaataatttaaaaaccaccttgttggccaggtacagtggctcatgcctgtaatcccagcactttgggaggctgaggcaggtggatcacttgaggtcaagagctcaagatcagcctgaccaacatggagaaactccatctctactaaaaaaaaatacataaattagccaggcataattgcacacaactgcagtcccagccactcaggaggctgagacttgagaatcgcttgaacccaggaggtggaggtggcagtgagtggagatcatgccactgcactccagcctgggcgacagaatgagactctatttcaaaaaaaaaaaaaaaaaaagcttgctcattaaagacttacttaagtcatataaacttgaaaaatactttggacttaattaatgagcactcttttatttataagccaaattggtaggcataacatataacaataaatatacatacatatacacacatctaaatatgtactcacacacagaaacaaagatccaatagcttttactttggaattctagttgggaggctgaggcaggcagatcacctgaggtcaagagtttgagaccagcctggccaacacggtgaaactccatctctactaaaaatacaaaaattagccaggtgtggtgtcaggcgcctgtagtcccagccacttgggaggctgaggcaggagaattgcttgaacctgggaggtggagatcgcagtgagccaagattatgccactgcactccaggctgggcgacagagcaagactccatctcaaaaaaaaaaaaaaaaaaggaattctagtcatgagatagtaatacaaactcacctatctatgaacgtgttcacatggctgcattttgtctgctctgataggtaatcccatgaagactgttgtattcgtctgtcctcacacggctataaagatattgcctgagactgtgtaatttacaaagaaagggggtttaattgactcacagttccacatggctgggaggcctcaggaaacttacaatcatggtggaaggcgaatgggaagccaggcatgtcttacatggcagcaggagaagaaacagagacagagagagagacagagagacagggggaactgccacttttaaaaccatcagatcctgtcatgagaacagcatgggggcaactgcccccatgatccaatcacctccctctaggtccctcccttgacatggggggattacaattcgagatgagattatggtggggacacagagccaaaacatatcagctgtgagccaaaatttcgggtaaagtagtttccacggcagtttgattttttttttttttaagacgggagtctcgcactgtcgcccaggctggagttcagtggcgcgatctcggctcactgagagctccgcctcctgggttcacaccattctcctgcctcagcctcccgagtagctgggactacaggcgcccaccaccacgccaggccaattttttgtatttttagtagagatggggtttcaccatgttagccaggatggtctcgatctcctgacctcgtgatccgcccacctcagcctcccaaagtgctgggattgcaggcgtgagccactgcgcccggcccggcagtttgatttttagaagtcaaacctttaaacattggggtcaaacagaagaacatcacgtattaaccaggctgaaccctgcttagaacagcagcccaggctgggcgcagtggctcacgcctgtaatcccagcactctgggaggccgaggcgggccgaacacgaagtcaggagattgagactatcctggctaacatggtgaaaccccatctctactaaaaaaatacaaaataattagccaggtgtgttggcgaacgcctgtaatcccagctactcaggaggctaaggcaggagaatggcatgaacctgggaggtggagcttgaggtgagccgagatcgcaccactgcactccagcctgggcgacagagcaagactccgtctcaaaaacaaacaaacaaacaaacaaacaaacaaaacaaaacaaaacaaaacataacaaaaaagaacagcagcctaaaagcctgggtacatggaactccatcccacatgatccgcctgccttggtctcccaaagtgctgggattacaggtgtgagcccccacacccagccttggtgatgattttttggatttgacaccaaaagcacagagaacaaaagcaaaaataagtggaattgcaacagactaaagagcttctgccaagcaaaggaagcaatcaaggaaattaaaaggcaacgtatggatggagagaaaatatttgtaagccatatatctgataaggggttgagatctctaaaatatataaagagctcatataactcaacagcaacataacaaatagctcaatttaaaaatgggcgaatgatcttaataggcattcctcaaaagaagacacacgaatggctaacaggtgtgtgaaaacatgcccaacgtcattaatcatcagggaaatgcaaattaaaaccacagcgagatatgactgtggtgataattttagcatataggtgtatcaaagcatcacatttccttccttctttctttctttctttctttctttctttctttctttctttctttctttctttctttctttctttctttctttctttttctttcctttttttgagacggagtctcgctctgttgcccaggctggagtgcagtggcacgatctcggctcgctgcaacctctgcctcctgggttcacgccattctcctgcctcagcctcccaagcagctaggactacatgcgcccgccaccacacccggctaatttttcgtatttttagtaaagacagggtttcaccatgttagccaggatggtctcgatctcctgacctcgtgatccacccgcctcggcctcccaaagtgctgggattacaggcgtgagccactatgcccggcaaagcatcacattctcaccttaaatatacacagcttttatttgccagtgatgcctaaataaaactggataaaatatgggaaataataagatttggcagaatgagaaacaacagaaattctcacatttggctggtggagataatttctttctttctctttctttctttctttctttctttctttctttctttctttctttctttctctttctttctttctttctttcttttctttctttctttttttgtggagacaggatcttgctctgttgcccaggtggagatattttttttttctgtggagacagggtcttgctctgttgcccaggctagagtggagtggcaccatcatagctcactgcagcctcgaactcccaggctcaagccatcctccctcctcagcctcctgagcagctaggactacaagcccatgccaccatgccaggctatttttttttgtaatttttcatagagatgaggttttgccatgttgcccaggctggtcttgaactcctggcctcaagtgatctgcctgcctcggcctcccaaagtattggaattacaggcgtgagccatcgcatccagccatgattttcttaataagagtttctttcctctagcttactttattgtaagaatacagtgtataatacatgtaacatacaaagtatgtgataatccacagcttatgttatcagcaagtcttctggttaacagtctgctgagttaggctttgggggagtcaaaagttatatgtggccgtttgactgctcaggggttggtgcacctaagaccccacattgttcaaacgtcaactgtctatggaagaaaacgtttacgaaacatctcactttgactgttgtatgaagaatggcctgtagggggagccagtggatacagggagaccgagtaggaggctttttgcagacaagagacttaaagtgttagactctgatagattaaatatgtaaattaaaatttctaaaagtataggaataaaatgtataatttctgaactcagaagaaaaacgggaataagacaaaaatccgaaacaaggcaaggaaggagagaaacagaaatacggaagaggcaaataattcctccaaaaaattcaaaatgtatgaagaattgcaattaatgcagatggtccaaatctgtgctactcaataccatgctattccatgtcaatagccatatgttactatatggcacttggaatgtggatctgaactgaaatgtcctgttgtggccaggcgcggcggctcacgcctgtcatcccagcattttgaggggccgaggcaggtggactacttgaggtctggagtttgagaccagcctggccaacatagtgaaacgcggtctctactaaaaatacaaaaattagccagggtatgtagggaccagccccacagggtcggtgggtttttctccctgtgtgtgtgaggagatgagagatcgtagaaataaagacacaagacaaagagataaaagaagacagctgggcccggggaaccactgccaccaagacgcagagaccggtagtggccccgaatgccaggctgcactgttatttattggatacaagacaaggaggcagggtaagaagcgtgagccatctccaatgataggtaaggtcacatgagtcacgtgtccactggacagggggcccttccctgtttggcagccgaggcggagagagagagagaggagacagcttacgccattatttctgcatatcatatcagagacttttagtactttcactaattttgctactgctatctagaaggcagagccaggtgtacagtatggaacatgaaagcggaccaggagtgtgactgctgaagcacagcatcacagggagacagttaggcctccggataactgcgggcgagcctgactaatgtcaggtcctccacaagaggtggaggagcagagtcttctctaaactcctggcctcgagtctgctaagtagcccgtgttttcccttggcactgacgctaccgctagaccacgggccacttggcaacgggcgtcttcccagatgctggcgttacccctagaccaaggagccctctagtggccctgtccgggcgtgacagagggctcgcactcttatctactggtcacttctcaccatgtcccttcagctcctatctctgtatggcctggtttttcctaggttatgattgtagagcaaggattattataatattggaataaagagtaattgctacaaactaataattaatgatattcatatataatcatatccatgatctatgtctagtataagtattcttattttatgtattttctttattatactggaacagctcgtgccctcggtctcttgcctcggcacctgtgtggcttgctgcccacagggtgtggtggcgggcacctgtaataccagctacttgggaggctgaggcaggagaatctcttgaacctgggaggtggaggttgcagtgagctgagatcgagtcactgcactccagcctggatgacagagggagactccatctcaaacaaacatacaaacaaacaacaacaacaaacaaacaaagaaacacattaagaaatgcttagtggcccggcatggtggctcatgactgtaatcccagcactttgggaggctgaggcaggtggatcacttgaggtcaggagtttgagacaagcctgaccaacatggtgaaaccccgtctctactaaaaatatgaaattagcctggcgtggtggcaggtgcctgtaatcccagctactcgggaggctgaggcaggagaatcgcttgaacccaggaggcggagtttgcagtgagccgagatggcaccattgcactccatcctgggcaacagagcaagacttcatctcaaaaaaaaaaaaaaaaaaaaaaaaaaagaaacacttaaggatctggtaggaatgtaaattgtgcagctgctatggaaaacagtatggcacttcctccaaacattagaatagaattactatgatccagcaattctacttctatgtacatacccaacagaattgagagcagggatgagaacagatattgttacgtctgtggccataggagtagtattcacagtaaccaagatacagaagcaaccccagtgtctactgatggatgaatgcataaacaaaatgtggtatatccatataatggaatattattccgccctgaagaagaatgaagttttaatatatcctacaacatggatgaaacttgaagacattattctaaatgaaatgagccagctgcaaaagggcaaatactgttatgattccacttatatgaggaaatgatggagcaaatttatagagacagaaaggagaaaggtgggtgtcaggggctggggaggagggaatggcgagtgagtgtgagtgtttaatgagcacagagtttcagttttgcaagatgaaaaactttctggagatggacggtggtaatggttgcacaacaatgtgaatatacttcatatcagtgaagagtacacttaaaattgttaaaatggtaaatttttgtatttttagaagagacggggtttcgccatgttggccaggctggtctcgaacttctgacctcaggcgatccacccacattggcctcccaaagtgctgggattacaggtaaattttatgttatacatgttaccataattaaaaatagatgcatttttaaatgcttagggaatatttccaaagcttggccttatactgagtgataaatcacatcgctatcaaaggaattgatatcatatactctctctaagttactcatggaggatcagaggaggaataaaaatgtaattaggacagtatctagtttcttaatttatttttatttttaatttttatttttttgagagagtctcgctatgtggcccaggctggagtgcaatggtgtgatctcggctcactgcagcctccacctcccgggtttaagtaattctcctgcctcagcctcctgagtagctgggattacaggcacgcaccaccatgcctgaatagtttttgtatttttagtagagacagggattctccattttggccaggctggtctcgaactcctgacctcaggtgactcccctgccttggcctctcaaagtgctgggattacaggcgtgagccaccgcatccagcttggaatcttaatttaaatgaagcagagcctttcagactctttaaataggcaaaaaatgtgcctgtgtttatcatcgaattcagtggttctcaactggggtgattctgtccttccaggaaacatttggcaacatctggagacatttttggttgttacaactgggggtgatcctggcatggaggcaggatcctgagacactcctcagcaccttgcagtgcccagatggctccacccaagaggacaatctggctccaaatatccacagagctgaggcttagaaatcaaaactgacaagtatttgcagttttttattttattttttgagacagagtctcgctctgtcgcccaggctggagagcaatggtgcgatctctgctcaccacagcctccgcctcccgggttcaagtgattctcctgcctcagcctcccgagtagctaggattacaggcgcccgccaccatgcccggctcattttgtatttttagtagagatggtgtttccccatgttggtcaggctggtctcgaactcctgacctcaggtgatctgcctgcctcagccttccaaagtgctgggattacaggcttgagccacagcgccctgctgccttttcttagaaacagagattttagtttcaatggtgtttccagggcaacaaataaagaaaatcaagcagaattatagagatttcagagactgacagttactttaccagaacacaccatctgactgtgaagttcaggtgtatagaatatacaaatcttcttctataaaagaatatttgcaagtctagtttcatggtgcagaataattgtttttttcagctgtaggggaaggagaaacatgttttttcccctctgctggaaggaaaaatatgctgcctccctttctccctcccttcctccctccttccctctcctttccttccgtccctccctccctccctctctccctccctccctctctctcattccttccttccttccctccttccttccttcaacttttttttttttttttttgagatggaaccttgctctgtcgcccaggctggagggcagtggcgcgatctcggctcactgcaagctccgcctcccgggttcacgccattctcctgcctcagcctcccgagtagctgggactacaggcgcccgccaccacgcccagctaattttttgtacttttagtggagacggggtttcaccgtgttagccaggatggtctcgatctcctgacctcgtgatccgcccatctcggcctcccaaagtggtgggattacaggtgtgagccaccgtgcccggccttactttttaaaatttaaatttattggccgggcgcaatggctcatgcctgtaatctcagcactttgggaggccgagatggggtgatcacagggtcaggagttcaagaccagcctggccaacatagtgaaaccccgtttctactaaaaaatacaaaaaataagccaggcgtggtggtgggcatctgtaatcccagctactcaggaggctgaggcaggagaatcacttgaacccgggaggcagaggttgcagtgagccgagattatgccattgcactccaaccctggggaatagtgtgagactctgtctcaaaaaaaaaaaattaaattaattaattaatttattttttgagacagagtctcagtatgtcacccaggctggagtgcagtggtgcaatcttggttcactgcaacctctgcctcccggattcaagcaattttctgcctcagtctatggagtagctgggattacagacgccctccaccacccgactaatttttgtatttttagtagagatagggtttcaccatgttggccaggttggtctcgaactcctgactccaagtgatccacctccctcggcctcccaaattgctgggattacaggtgtgagccaccgtacctggctttaaaaataattttaaattaaattttatttattttttgagacaaggtctttctttgttgcccaggctggagtgcagtggtgcgatcacagctcacttcagtctcaacttccccaggctcaggtgatcctcccacctcagcctcccgagtagccggtaccacaggcaggtgccaccatgcctggctaattttttagttttattttttgtagagacaaggtctcgttatgttgcccaggctgctcttgaactcctgagctcaagcaattcacccgcctctgcctcccaaagtgctgggattacaggcaggtgccaccatgcctagctagtggccattatttattgagcatctagtttgtgccaagaactgctaaactaagcacatgtgggtcgggtgtggtcgctcatgcctgtaatcccagcactttgggaggccgaggcggacggatcacctgaggtcaggagttcgagaccagcctgaccaacatggagaaaccccatctctactaaaaatacaaaaaattagccgggtgtggtggtacatgcctgtaatcccagctactccggaggctgaggcaggagaatcacttgaacccgagaggcagaggttgcggtgagccgaggttgtgccattgcactccagcctgggcaacaagagcaaaattccatctcaaaaaaacaacaacaacaaaaacaaaaaaacaaacaaaaaaaccctaagcacttgtgctgttttaacgatacccagatagtagggggaaatatgagttatgacatagtggggatgcttttatcactttttacaggtgaggaaactgaggcacagcaaggttaagtcagccacttaaggtcacccaaccagtaactgacagagtggagatctggatcagaaggaagaatggaaaaaaaaatcttaaattattttaaaatcactatccttccatgcaggatctctttgaatcttcccagtgacttagtgaggaatgagctattttttttctgtattgtacagctggggaaactgaggcttagtgaggtgaagggacttgaccagagtgatacaggagcccctaaactgtggcaattcagttctcagggccaagttttggtaagagtgtcctgaagtggggtgagggcagcgtaaagaggaacatggagaagaaagcgtgggagggccgggcgcggtggctctcgcctgtaatcccagcactttgggaggccgaggcaggcggatcacttgaggaaaggagttcgagaccagcctgcccaacatgacaaaaccccatctctgccaaaaatacaaaaattagctagacgtggtgctgggcacctgtaatcccagctactcgggaggctgaggcaggagaatcacttgaacctgggaggcggagattgcaatgagtcaaggttgcaccaccacactccagcctgggcaacagaaaccctatctaaaaaaaaaaaaaaaaaaaaaaaaaaagcaaacagctgggcacagtggctcaagcctgtaatcccagtactttgggaggccaaggcaggagggtctcctgaggtcgggagttcgagaccagcctgaccaacactgagaaaccctgtctctactaaaaatacaaaatgagcccggtgtggtggcacatgcctgtaatcctagctactcgggaggctgaggcaggagaatcacttgaacctgggagacagaggttgcagtgagccaagattgcaccactgtgctccagcctgggcgacacagagaaactcttatcttaaaaaaaataataaataaacaaacaacaacaacaacaaagaaaagatgggagatgaagggaagcaggtgcaaagggctggatttgaaatcctgagatgataaaggtcaacacccaaaggctcaaaacccttctccaaaccctcatctgagctcacccagcacctgtgacgggggcccacctgcatagaaagacactcaattggatgttcatcactgcattgcgtataacactgtgaagcaggctacgtgtccatcagtaggagagcagataataaaatggggtctatgcataggctgataccagcccatatatccacccagaagatataggtgagtgggttagggcaagggctctgaaaccagaaggatctaccacttcctagctgaagaaccttgcactggtgacctcactccctcgtgcctccgttagctcatctgtagttaggggacaatcatagtatcaacatcgcaggggttaagatgatctgggttaagcactgagcatgtggaaatgactcagtagatgaggtgtcagcaaacttttcctgtggataagaccaatggagacctctaaaatcactttccttgtcacctctcactgaccaagacagtaaatcaatgcaaggttgggccaggcacggtggctcatgcctgtaatcccagcaccttgggaggccaaggcaggtggatcacctgaggccaggagctcgagaccagcctggccaacatggtgaaaccccgactctactaaaaatacaaaaattagccgggcgtggcggcacgtgcctgtggacccagctactagggaggctgaggcaggtgggtcacttgaacctggaagccggaggttgcagtgagccaagactgtgccactgcactccagcctgggctgcagagtgagactctgtctcaaaaaaagcaaaagcaaaagcacaaacacaaacaaaaacaaaaacaaatgcaaggttgcatcacagtggaatagcagagattaatgtcgcccttaagggcctaaagacatggtgagcaaggtctcagatccctcagggatgaggatctaggtgaccccaccaggtgagccacctacaccaacagaagggccacctgaagatgaagggactctagaagggacagtgggagagggagagggtgaacactcacgggggctgctagactccactcctgcagtgtaaactgtggctcatcccaccaaccttcattttctggctggcatagagaccaagaatcctaagtagctgtcctcaaatgcagtgagtctccttataaaacaaatgaatctgggccgggcgccatggctcactcctgtaatcccagcactttgggaggctcagttgggcgaatcacctgaggccaggagttggagaccagcttggccaacatagtgaaaccccatctctactaaaaatacaaaacttagctggacgtgatggggggcacctgtaaccccagctactcgggtggctgagacaggagaatcgcttgaacccaggaggcagaggttgcagtgagccgagatcgtgacactgcactccagccaaaaacaaacaaacaaacaaacaaacaaacacacacacacacacaaaccccaaatgaatctgagtggcttaaggggcgggctatagcggatgctgtggtgtgctacccaatccccaccgttctcctattgctattgtaacaaattaccacacacttaatggcttaaaacaacacagattggttgggtacagtggctcacatttgcagtcccagcactttgggaggccgaggtgggagtgtagtgagaagccaggagtttgagaccatcctgggcagcatagtgataccccatgtctacaaaaaaaaaaaaaaattagccaggcatggtggtgcatgcctgtagccccagcattttgagaagccaaggtgggaggatcgcttgagccaggagttcaagaccggccagggcaacatagcgtgactctgactctacaaaaaattaaaaagttagtcgggtgccatggcatgggcctgtattcccagcaacttgggaggctgaggcaggaggatcatttgagcccaagagtttgaggctgcagtgagctatgatcgcaccactgcactccagcctggctgacagctggtctcttaacaaaaacaacaacacaagtctattatcttaaagttctggagcccagactccaaaatcagtttcaccaggcttctccctgtgatttttcaatccagggttaaatgcactccaggctgctggagtgcagtcatatgatcgtagctcactgcagccttgaacccctgggctcaagcaatccttctgcctcagactctcaaagtgctgggattacaggcatgagccaccacgccctgccctccctgtgtctttataagatggtccctttttctgtatccctgtcctaatctccttttcttatacagaccctaatcttattgaattggagctcatcttaagggcctcattttaagttaattaccttttcgaagattcaatcttcaaatacagtcaaattctgaggtggtgggggcgaggacttcagtgtgtaaatttcgggggaacatagtgaggcccgtaccatggaggaaagttcctacaccctgctttttaggtagagatctagaaacatggaaagttccccagaggagttttagaggaacctaaagatagagaaggcttggactctgctcaccacaacagagaccagagaagcggcaggtctccaaaaaaggaagtgacttaatagtggctttgggcatctgaagccacagaaagcctcaaaaagtttcctgtgcctcaactcagctgaaaatcggcctcacgagcaaggtataggagtagtagagaaagtgctgcctttctttctttcttttttttttttgagacagagtcccactctgtcacccaggctggagtgcagtggtgcgatctctgctcactgcaagctccgcctcttgggttcaagcgattctcctgcctcagcctccccagtagctgggactacaggtgtgcacaaccacgcccagctaatttttgtatttttagtagaggcgggggtttcaccgtgttagccaggatggtcttgaactcttgatcttgtgatccacccacctcggcctctcaaagtgatgggattacaggcgtgagccaccacgctcagccaaggcgctgcctttctaaggaacaaggacaagaaagaaggtctcataggccaggagcagacggatggtggggaccttatggacatgcattttgagaattagtcttttcttcacccttaatgcctccgcaattccaaagctccctggaactttgacagtcttgggaaagcaggatgtagggagagatggtttccgagggactgttggcaggttctcagcattctggtacaaaggggtcttgaaatataaataacgttacgttaatgaaaaaataaagttaactttgcactccttgtggattgagatttaatttttttttttttttttttttgagacagggtctcgctttgtcacccaggctggagtgcagtggcatgatctcggctcactgcaacctccacttcccaggctcactggatcctcccgcctcagctcccttagtagccgggaccacgggcatgtggcaccacgcccagctaatttttgtagagatgggattttggcacgttggccaggctggtctcgaactcctgatctcaggtgatccacctgcctcgacctcccaaaggctgggattacaggcgtgagcctccatgccccgcctggattgagatttatataaactgcttttgtgccttagtttgagttcccataaaagcagaccctgggaaaaagatgtgggggcaagaggtttattagctagctattgctgtgtaagaaatgaaattatcaagaacctggcagcttaaaacaacacatctttatctttttttttttttttttttttttttttgagacagagtctcgctctgtcgcccaggctggagtgcagtggtgcaatcttggctcactgcaagcttcgcctcccgagttcacgccattctcctgcctcagcctcccgagtacctgggactacaggcacccgccaccgcacccggctaattttttgtatttttagtagagatggggtttcaccatgttagtcaggatggtctcgatctcctgaccttgtgatccgcccgcctcggcctcccaaaatgctgggattacaggcatgagccactgcgcctggcccacatctttatcattatctcagtgtcctcagtcagaagtccaggtacagattcacgtctgtaatcccagcactttgggaggctgaggcaggcgagtcacctgaggtcgggagtttgagaccagcctggccaacatggtgaaaccctgcctctactaaaaatacaaaaattagttgggcgtggtggcaggtgcctgtaatcccaggtactgggaggctgaggcgggagaatggcttgaacctgggaggtggaggttgcagtcagccaagatcgcgccattgcactccagcctggacgacaagagtgaaactccgtctaaaaaaaaaaaaaagttcaggtagacggacagtttaattgagcattgtgctgtgggtctcaagactacagttcatatgtcgactgcactacattctttcccggagtttgcagtccttttccaagctcagctggttgttggcagaattcggttccttgtggtggtaagattgaggccctcggcttttagaggcttcttgccgttctgtgccatatgaccctttccataggcagttcacagctggcaatgtgcttcttcaaggccatcagggaacctctcattccagtctgatagtcctatataatgtaacctaatcaagggagtgatagcccatcacctttgccatcttttaaatttttatttttatttttttaaattgagacagcatctcgttctgttgcccagactagagtgcagtggtgtgatcatagctcactgcagcctcaaacttctggactcaagcagtccttccacctcagcctcctgagtagctgggactacaggcatgtgctaccacgcctggctaatttttaaaattttttgtaggccgggtgcagtggctcacacctattatcctagcactttgggaggccgaggcagacggatcacctgaggttaggagtttgagaccagcctggccaacatggcaaaaccccatctctactaaaactataaaaattagctgggcgtggtggcacatgcctgtaatcccagctactcaggaggtccaagcaggagaattgtttaagcctgggaggtggaagtttcagtgagccgaaatcacgccactgcactccagcctgggcaacagagtgagagtctgtctcaaataaaataaaataaaataaaataaaataaaataaaataaaataaaataaaataaatttttttgtagagccaaggtcttgctatgttgcccaggccagtcttgaactcctgaactcaagcgatcctcctgcttcagcttcctgagtagctgggactacaggcgtgtgccaccacacctggctaagtttttaaattttttgcagagccagggtcttgccatgttgcccaggctggtcttgaactcctgaactcaagtgatccttctgcctcagcttcctgagtagctgggattacaggcatgcgccaccatgcctagctaacttaaaaaaaaatttttgtagagatgcgatctcactatgttgctcaggctggtttccaattcctgggctcaagcagtcctcccgcgttggcctcccaaagtgctaggattaccggtgcaagccaccacacacctggccatctttgtcatcttctattggttagaagcaagtcaggttctgctggaactcaaggagaggggattatacaaaggcttggatgccaggaggtaggaatttttgggaaatcaccccagggtctgtacaccacaaaggcatccccaggaaatgtgagaagaggtatgggtaggaactaatacagggtgtattagtgcacaggtgtctgctatgggctatcccattggggactttggggtgactgtgtagactatgccttggagttgtcccaccctggggacagggaagccgggtatttatccactaaatcccatccatcattggttaaatgctgctccttgtggtgttaatgatggaaactctctattgcctataactgacaccacaattctttacactggcatttacaatttccccttgccctgcctcattttcctctgtgacccctgccatggtcaccctccactgcagccttagactagcgatggccctgaatttcctccctgttcactgagatcttcctgatcctcatccagccttccatggcctcagaccactgagctctctcccgttgcagaaatcctgcagaacatttttcctggaccccttactgggtgtaggggaccccagaataactcatgtccaggctcctttttttgaggatcctctgggatgggtggaggagtcacagctggacaagatgcttttagttctatgtggtcagggctggaagaatggagccccagggatggagcccaggaatggaggagatgggatgtgggtgagattcagaaaaagctttatggaggaaggctgagcttatctttttgtctccttaccccaaaacctccctcccaactttgatgctggagcctgctgttccttctctgatcagaatcctctctcttcatgtctcacccctgtcctaacaggggtgctatgaatccactcttctggcccccaccattagatcactgatgtgatctaaccacatcagtctcctgctgaaagacctccaatgtttgagatatatatatatatatatatatgaaacttaatggttccatttctctggagaatcctgactaatacagattttggtaccaagagttgttctaaactgggtgtgatggctcatgctggaaatctcagcattctgggaggctgaggcaggaggatcgcttgaggccaggagttcaaaccagcctaggcaacacagtgagacctcatctccaaaaaaatttttttaattagccaggtgtggctgggtgcggtggctcatgtctgtaatcacagcactttgggaggccgaggtgggcggatgaagaggtcaagagatcgagaccatcctggccaacatcatgaaaccccatctctactaaaaatacaaaaattagctgggcatggtggcacgtgcctgtagtcccagctactcgggaggctgagaagggagaatcacttgaacctaggaggtggaggttgcagtgagccgagataatgccactgcactccaacctggcaacagagcaagactccatctcacaaaaaaaaaaaaaaaaaaaaaaaaaaaaaaaattagccaggtgtggaagcgtgtacctgtagttctagctgtttggaaggctgagatgggagaatcccttaagccaaagagtttgaggctgcagtgagcgatgattatgccattgcaatccagcctgggtcacagagtgagaccccaactcaaaaaaaaaaaaaaaaagtggttctagaggaagaatgagctttctgaattgcttctcgttcttctgaaattggctctctaatctgattaaactgaaagaggctaatgactctttacagtagtaagagagcactggtggtccatggcatgatctggcaatagagagatgcagatatcaccactgtatactcctaattaactatctataagaagcaaagatcttgtcactgtgtatttgatacttctgagaagttttgaaaatcgaatgaatataatgagattggctggctcctcctaatgtcactggatagagtgctgagagaagaggatgaacttagggatttgaattcccagctcaagcactgcataagtaacctgacatcttctatgtgtgccctaaaggacatccttgtctcctgtagcctcagggctgagagtggtgaaaagcaaacacagaatcttattctgtgattggccggatttcagggcaagttggactcccagcttccaaggatgtctactgataaactgagggcattgattagtatcaatggtatcctgtaagaatagtatcctggaaactggaattgggatatgtgggaagacaaggatgaagttgaggacatggagcacctaaattctgagtcttgtttgccgctggaaaggcctctaccttcccctccttggttctgtttctctggagaaccctgactaacatgactggcttgaatctggatccaaatgtaatcccagcactttgggaggctggcatggtggctcacatctgcaatcccagcactttgggaggtgaaggagagcgggtcacttgagcccaggagttcaagaccagcctgggcaacatagcgaaaccccgtctctacagaaaatacaaaaataagctgggtgtggtggcgcatgcctgtaatcccagctacttggaaggctgaggcaggagaatcacttgaggcaacatggttttatacatacgtgaaggagatacaccttctaccccttggagataccttcaaaatattcaagggggcatgtgaaatgggatgatatctgaaacaatatcaaatttagaaagagggtagttgataaagtcagcaaggcaggacattgaaactattgaatttaagtgatggatttatgggtatttcttagactattgtcctctccttttggaaggagaggaaagtttgcacactggatttgttggatgcatttcctactaaaaaaaaatcaataaatattttccctttacactctctacgcctactgctgttttttcttaagctattggatacactaggttgcttgtcctgtagatttttccagtgtgatttcacccttgcagtgtcattgcacgtattcttctatcccctaaccctgtaaaccagagcttggcaaatattttctataaagggcccaatactaaatacttttggctctgtgagttatgcagtccctgtcacggcaacttaatccttccatttaagtgcaaaagctgtcatagacagtatacaaatagacgggagtcactgtagaccaataaaaatctttatggatgctggaattttaattgcatatactttttgtgttataaaatattattcttcttttgacttaaaaatgtgaaactattcttaacttgtgagctgtacaaaaattggaggtggggcaggattgtgtccacgggccagtttgctgacccctgctgtaagctggtaatctgaacataagacttgatcagagtcgggttcaattctgggagacagagggagatttaaataccctgtaagggagattaaaacgccctgtgggtgaagctagactctggggaattggttttattaaggaaatgtcatttcgttgaacgtgatcatggcggcatggttttatacgtacatggaggagatataccttttatcccttggagatacattcaaaatattcaaggggggatgtgaaatgggatgatatctgaaataatatcaaatttagaaagagggtagttgataaagtcagcgtggcaggacattgaaactattgaaatgaagtgatgaatttatgggagtttcttagacaattttcctcttttttgtgcatgttcataaattgccctaataatttatttatttttttgagacagggtttcacccctgttgcccaggctggagggcagtggcacaaccttggctcactgcaacctccgcccctgccaggcttaagcgattctcctgcctcagcctcccgagtagctgggactgcatgtgcatgccaccacacccagcttatttttgtattttttgtagagacagggttttgcgatgttgcccaggctggtcttgaagtcctgggctcaagtgatccgccctccttggcctcccaaagtgctgggattacagatgtgagccaccgtgcccggccctaataagtttttgtaaaaatctctaggcattaacaatttttaaaaagtattctaatggtcttccattagaaatcttccattacacttaaaataaaattctaatggcttatacaaagtccttcctcttctgtctcctccacccctctggccactgctcactgcaccccgccctcctcctcactcttcacctctggactccagagactctgggtttcctttgattcctggatgtcttcaagctccttcctgcttcagagcctctgcacaagctgctccctttgcctagagccctcggccctccagtctttgttttatcaactcaaaggttaaatgtcagaatcctttgcattcccaaatcctggtcatgagccatgttatctaaggatattcaaggattccaaactcaaatgcttacaggggccaagtaattggtgtaaacatgtaaagtaagctggattctgtttttaacactcataggcacacaccttgattatttaaaatatagaaaacattctttatttgccacaaaggactgttatggcagacagaataaggcaatttctccccaaccccacacctcaagatgtccacatcctactccttaggatctatggatatgtttgtttccttacacagcaaaagagatttagtagatgtgattaagtaaaggaccttatcctgggttatgtgggtaggtccaacctagtcaaaaggatttttgttttttgtcctttttttttttttttggtaagtgacagggtatcactgttgcccaggctggggtgcagtggtgcgatcatggctcactgcagctttggactcctaggctcaagcaatcctcccatctcagcctcccaagtagctggaactataggcatgcaccaccacacctggctaatttttgattttttatacagacatggtctcactatgttgcccaggctgatcttaaactcccggacttaagcgatcctcctgcctcagcttcccaagtagctggaagtacaggcatgcactaccactcctggctattttttttttttgagacagtgtcttgctctgttgcccaggctggagtgtagtggtgtgatctcagctcactgcagcctccaccttctgggctcaactgatcctcccacctcagcctcctgggtaactgagactacaggtgcatgccactatgactggctaattaaaaaaaaaattttttttttgtagagatggggtctcaccatgttacccaggctggtctcaaacttctggcctcaagtgatcctcccaactcagtctcccaaagtgctggaattacaggcatgagccaccatgctcagtctaatttttttttaatgttaatttttgtaaagatgatgtctcagtattttgcccaggctagtcttgaactcctggcctcaagtgatcctcccatctcagtcccccaaaatgctggaattacagttgtgagccaccacacctggcctatttttgtttttttaattttaatgtttgtagagatgaagtatcactatgttgcccatgctggtcttgaactcctggcctcaagtgagcctcccctccttggcctcccaaaatgctgggattatagcagttcccagtcagagattcctataaaatggaggcaggaagggatcagagtccaagaaagaggtgataatgggagcagtggagggagagagagagatatttgaaggcgttatacttctggctttgaagacagaggaaggtggacatgaactagggatggatggtggcctccagaagtgagaaaaggcaggaaaaggctgggtgcaatggctcacgcctgtaatcacaacactttgggaggccaaggtgggtggatcacctgaggtcaggagtttgagaccagcctgatcaacatggtgaaaccccgtctctactaaaaacacaaaaattagctgggcatggtggtgggcacctgtagtcccagctactcgggaggctgaggcaggagaatcacttgaacccgggaggcggaggttgcagtgagccgagaccatgccattgcactccagcctgggtgacagagtgaaactccgtctcaaagaaaaaaaaaaaaaaaaaaagaaagaaaagaaaagaaaagtcaggaaaatgaattattccctagaactcccagaaaaaaatacagctctgctgatactttgattttagcctcttaagactcattttggacttctggcccctagacctgtaagaaaataaaatagtgttgttttaagccactaagtttgtgatcatgtgtttcagcagcagcagggaactaataaaacgatgaactctcctttttcttaaaactttggtcatctcaggctgttatatattttctcacctttgatggagaagtgacaacttctctgtgcctggatttccccatccataaaataggagtcaaaatagtacctccctgcaaggttattgtgagaattaaataagttaaagtgaatgagtaacacttatcatggtgcatagtgagtactccagaaatgtgaagtataattaatattactattacttaaaaacaacagcacaagtatgatgatgaaaggcgactggcattcagcctcagtgtgagagacaactgggagtggtggggactgtggtgagctgctgagcccatgccctatccaaaggagacagccactatccaacctgggctgttgtcacagcttctacctccccaagaaaacccagaaatctggatttgtccatgtctatgtgaaaattttcttttttcttttttttttttttgagatggagtcttgctctgtctccctgtctggagtgcagtggtgcaatcttggctcactgcaacttccacctcctggattcaagcaatcttcctgtctcagcctcccgagtagctgggactacaggcacatatccatatgcctggcttgtgggtgaaacacccatagggtttcaccatattggttaggctggtctcgaattcctgacctcaggggatccacccacttcagcctgccaaagtgctgggattacaggcgtgagccacccacgtgcaaaatttttgaatatttatataatggttaccaattcccatttaaaaaacacactagatgtggcctgtgaatgtaaggccacttttgatgtaataactgaaaagaatcagaaatttaaatgtgcacatgattacagcatgcttacaaaaagaatagctacgaaggattcaagagctcactgtgggccaagctctgtaaaagtacctaagggttcaagccatgtaatctcacaataagcagggtaaggtagaggccacttttcatcgtcttttaaagatgaggaaactgaggcccagagatgccaaggatgaatactaaggtcacccatctgggaagtgacagagtggggatttgacctcagggggtctggcttgtaaaggaacatagaaaatatcagaaccctcaacctctttgtgcaaaagggaaggctaagcttggaggctgagtcattgtcacatcctcatccaatgaatagctgtcactggttttatgtatcagctatatccccccacccccaaaagtaaaaggcctcaggcatctatgaagggctaatccccacagatctttcctcaggaaattctttgctggcttcctataaacaagaacatgaaaatgttaactttaggtctgcaatctaaagctaaagtctgttccatttcacagtgacaacgtcaattacaagcttatcttcccaggtgaaagacaaagacaagacaagattagtcattgctcccttcctcttcaaacattcaccttagcttatgtaaaatgtagatttactgggcactaactaaagtctcataagaatgtaagggtttgccttactgcctacctgcctttcttcctcagtgccattcccctctttaaggaaatgtgtaggccgggcacggtggctgatgcctgtaatcccagcactttgggaggccgaggcaggtggatcacctgaggtcagtcaggagttcgagaccagcctggccaacatggcaaaacctcgtctctactaaaaatacaagaattagccgggcatggtggcgggctcctataatcccagctacttgggaggctgaggcaggagaattgcttgaacccagggggtggaggttgcagtgagccgagatcatgccacttcactccaacctgggtgaaagagcaaagctccgtctcaacaaaaaaaaaaaaaaaaaaaaaaaggccgggcgcagtggctcaagcctgtaatcccagcactttgggaggccgaggcgggtggatcaggagatcaggagatcgagaccatcctggttaacacggtgaaaccccgtctctactaaaaatacaaaaaaaattagccgggtgtggtggcgggcgcctgtagtcccagctactcggaaggctgaggcaggagaatggcgtgaacctgggaggcagagcttgcagtgagccgagatcccgccagtgcactccagcctgggcaacagagcgagactccgtctcaaaaaaaaaaagaaaagaaaagaaaagaaaagaaaaatgtgtaaatatgaaacctcctgaaacttctttggaaaaacagccacagaggcaactgtggctggtgattttcccagatgtgtgctaaagctggcttcagaaaccttgatcaattgactcttgcccctgtctcacattctggtcatcaggctccaggataagaaccatcctgcttctctgcaacgatgcgtctcaagtgttcaaatgctgtggcattccccaggaggaacatagcgtcctactatgagattaatcatttgttttcttggccaggcatggtggcctgtaatcccaacactttgggagaccgaggcaggtggatcacctgaggtcaggagttcaagaccagcctggtcaacatgttgaaaccccatctctactaaaactacaaaaaaaaaaaaaaaaaaaaaaattaaccagatatggtagcgtgtgcctgtaatcccagctactcaggaggctgaggcaggggaattgcttgaatctgggaggcggaggttgcagtgaggcaggatcgcgccactgcactccagtctggacgacagagtgagactgagtctcaaaataataataataataatttgttttctcatcattgcttctttacttctaccacctcttggtcttggcaagagatgaagaggggggaggatttcctgcccagggggtgggggtagggtgaggacggtggacttcaggtcctgaggaagagctgatggtggtggtgggttggtgggtgcggtaaggaggcaatctgaaaagaagctggagcgcaggaggcgaaaagaggaaatgaggtagataaacttctcagaagtgaaaagtaggttagcagcctggtataggaggtctctgtccctatactttattgaaggtcaagtacgggtgtacagtctcttgttgcaccagcttctgtctttgtggggtttttccttgttctcctcccatcttttcctcccctccctgtctttcctttctctcctctctttccccttcatctccttcccctctccactcctcctctggctctccccttttttccctctccatcctcctcctcctcctcctgccacctcctcctcctttccccctctttcttcatctgcccttccccatctctttccatcctcctcctcacccacgtctccttcttcctctctctccagctcctccaggttgagagacgcctcccagaatgatttttggaggctaaacttagcaagaggttccatccccacgcggaagttggtagctgctggtgacttttatcaatacatgctctccacaccttggtttcctcatcaaagccacagaaacagaaagactgtgatgagagtgaaggaaactccagcgggggttggggccaggcgctgggggctctcctacctcccaccagcccagcaagggcagggaaggcaggaaactgccctgaatccactgcgtacccttggcagaggtaaagggcatccttgcctctctcggtccacagttctgcgtctaagatgtgcagacagtaacagctcctgcccgaagccaaaagatgcatataaatgtataactcacacaagacgcctaggccttgaataggccgggcacggtggctcaagcctgtaatcccagcagtctgggaggctgaggggggtggatcacctgaggttgagagttcgagaccagcctggccaacatggtgaaaccccgtctctactaaaaatacaaaaagaaaaaaaaaattagctggttgtggtgggcgcctgtaatcccagctactgggaggctgaggcaggaaaatcacttgaacccgggaggcagaggttgcaggttgcagtgagctgagatcacaacattgcactccagcctgggagacagagggagactcagcctcaaaaaaaaaaaaaaaaagaaagaaagaaattcatttatgtttcatatataccttgtacacatagactgaagataatttcataaaatagtattaataattttgtgcatgacacaaagttggtgtacactgaaccatttgaaagcaaaggtcactgtctcagccacccatgtggacaatctgtggttgcttggcatcatcatcattccttttatttatttattatttttatttttatctttttttgagacagagttatgctctgttgcccaggctagagtgcaatggcgtgatctcagctcaccgcaacctccacctcctggattcaagcgattctcttgccttagcctcccaagtagctgggattacaggcacgtgccaccatgcccagctaattttgtattttagtagaaatgaggtttcaccatgttgaccaggctggtctcgagctcctgacctcaggtgatccacctgcctcggctggaattccaaagtgctgcgttgtaaccgggcaagttatagagaaacgccacactcttagactaattaaggagtcctttattagccggcgactgagagatggctagcgctcaaaattctctcagccccgaagaaggggctaggtttctttttataccttggtttagaaggggaggagggagcagagctgaagcaattttatggaagcaaaacaggcaagaaaattaaaaagataaatggtaaaaggaaaacaaacagttccaggtgcaggggctttaaatctatcacaaggtgatagacgcgggggctttgggtgctatcaaccggacgaattcctgggaattgtggatatagcttgtcacagtatcttatcagtaatcgcattcttggatgtgctgggagtcagcttaagtccttgaggaaggggggtgggtgagggactgcaaatgaaggagccaaaatggagtctgtctggctttctcagctaagggagggtcaatcaggttaaaaacaaggtagggtatgacattccccactcgtgttttggggaatcgaatcattgattcctcggttataacaagggggttatattgggtcctaagatacataagtttgacagaagctatgcgctgctttataaagttaagaacccatttaatacacaaggcctgaagactaacaagaggaggagaatgggtcctgccaatccagtaatgagagtcgtcagccatggattccaattaagcatgttttggtaccagggggtgttattttctcgtttttgctggcatctatctagattttctcgaactttttggagagtatcttttatgactccagactgattggcatagaaacaacgactctctcctagagctgtgtgtagccctccttgggagagaaatagcagatctaagcctcggcggttttgaagaactacttcagctagagactctacctgggtatgcagtatatttatggctgattggagattgcttaaattagcatctacttgttttttttttttttgagacagagtctcgctctgtcacccaggctggagtgcagtggtgcaatctcagctcactgcaagccccgcctcccgggttcacgccattctcctgcctcagcctcccaagtagctgggactacaggcgcccgccaccacgcccggctcgttttttgtatttttagtagaaacggggtttcaccgtgttagccaggatggtcttgatctcctgacctcgtgatccacctgccttggcctcccaaggtgctgggattacgggcatgagccaccgcgcccggccagcatctacttgttgagacagggacattagtccggtctctccttgaaccagggcagccgtgccaatggctgctgatccagctatgctaaggccggccagaaggggcacaaggagtggggcagctcggtgaaacctggaatgtaattcagggggagcgatgagaagctgtccttctggcccactgtacgtgtagacctgggggagcacatgaaccaacacgcacaggaggggtcctggttcagtcccattgatgcagcgagtgagacctaaagtgcaggctaaccaggtattgttaggtgcctggcaggagactgaggcacttaagggagtaagtagagactgattacaggtagcctgtaagggagaagtagagaagttatatccagtgctaattagagaagaagtattcccggacatgtctcctagtatgagggcatgggggcgtgtatgacaagaaagagagcccattttattttgttttgtttagttttgtttgaggcagagtctcgctctgtcgcccaggctggagtgcagtggcacaatcgcggctcactgcaagctctgcctcccgggttcacgccattctcctgcctcagcctcctgagtagctgggactacaggcgcccaccaccacgcccggctaattttttgtatttttagtagagatggggtttcactgtgttagccaggatggtctcgatctcctgaccttgtgatccacccacctcggcctcccaaagtgctgggattacaggcgtgagccactgtgcccggcgaaagaaagcccattttaagcatagcttctactcctaatccaacatcatatgggggtttggccttcaggcacaaccaacaatctcgggctagttgaggccgggtgagattaaggaggtgctgtaccctgtccagaatggacatcaggctgggttggaggtgttgccgttgcagctgaggtttagaaaccaggaacggcggtgggaaagttaaatcgaccctgtctgggtgttttgggaacataggattacctaaatcagttaaaggtccgattggcttaggagagctctatgggaccaggatttttttctggatggtgaacatagttccaacattaaatcctgagatataaagccttaatccccatgacatgccataataccattgagctgtaccagggttatggatagttgtaggaagagggttgcaatttctcatagtacacagtctaggatgggaagtgcgagttatggagagggttgaggactgggttgatcctccagggtaagtggctagggttacacaggaccagcgagggcagaaaaactgataagaatcttgacaacttcagtcagggtgatttccaagacagaggtaaaagtcagcctcctggagtcctttttctgcacctttagagcttccacatgcagtccggcttcctatgtgtccaaaccctgctgcaaggtcgacgttccctgttcccatgaccggcagattgcgttgctcttcacgggtgagggcaggctctgggaacaaagcacataaatcgactgcaaaagagacttccttggaggtccccgccttccaggtggtgattgcaaacacacgtcctgtcgtgaaagaagtaaggagaaaagagtaggaaggagcagagggcatgacaggtggaaacaaacaaaagaggtaaataaaaagaattaatccaatggcttcactcgacttaggtgcagttttaaggggcccgacccaggcttggggtctgtgctggggtcttgcttggggtcttgctggactttgttggcctttttgatgtgagagtgatgaacccaagcaggaatgctgtccactttcagatctgtcggcatggtgaggatgacagtatgaggtcctttccaggcaggagtgagtccttccttctggaactttttttttttttttgagacggagtctcgctctgtcacccaggctggagtgcagtggagcgatctcggctcactgcaacctccgcctcctgggttcacaccattctcctgcctcagcctcccgagtagctgggactacaggcacctgccaccacgcccggctaattgttttgtatttttagtagagacggggtttccctgtgttagccaggatggtctcgatctcctgacctcgtgattcacccacctcggcctcccaaagtgctgggatgacaggcgtgagtcaccgcgcccggccgagaaattttgtaacatgcgttggagagggctccaatctctacagggctgggaagaagagtttcccattctggaggcaattaacaaggtttaagcagaaatataaaacccagcacggacagagaaattcacggcctagagggctgcagtatcggaagaacagaggtagatgtgcggggtaagggatggggatgaggaggaaaaggggccactcggatcttctcaggctgggaggagccgtgctgggcagcgctgggtcgccaggactactccgcagtccccccgccccgcctccaggccccgtcaggcgctgcaagcccagctcagaagcccgggcccgggaccaaggtcaccgcagcagtccgggcccctgcgttctgagccgggtgcggacgcgccggtagtcggggaagtcagggtctttgacgcctgaaggcgcaggagcgggggtccctgggggagagggtccagcaccgtcacctcccactcctcatccgtgggttggggagcccctgctgtgggggaaggaggctgtttcgtttgtaaactggcggaggagtggcccctgggcctggcaacccgaagagacacgcctgagaccccctgtaatagaaaatctgcactaaaggactttgaagaagtccttgcccagtcgtcttgggcaatatgggtgacctgacccatgaaatttagacagacaccaaacaggacaatagacactaaacaggacaatagacactagggtatatagacaattatgacaatttttatagacagacaaggggtgggggtcccgtgatgggatcagtcagatgcccgcctggccactccccttgtgaggactcaggctcctcttagctttggcaggccggtataaacgcccgttcagatccagctatgctcaatgctgccctaagccttatgaggtcaccacggaaccacaggtgagggcccactcgaactctgtagcttttgccgtggagctacaaactgaaaattcaagcgcgagcccttgacctccacattcactcactcactcacacagagtttattacaattcttcaatacccgttttaaaacagaggtctccttgagacctcaacgagaggagaagagatagagagagagagaaagaaagagactagtcttacagagatgcctgacagaaaccaggactctgtcctccagcatcctggaatttggacagagtcagagggatgccctcatcagagccgcttccctcccagagaaacagagtcagacagaaaccaggactctgtcctccagcgtcctggaatatggacagagtcagagggacgccctcatcagggccacctccctcccagagaaacagagtcaaatctgacttaccttcccgggaccagacactgaggactcaggagttgaatttggttgaggacaccggcagccgatccgttcccctctggaagacggtggcctacacgtccctggaacgtctttaggtggcgcctcccctataagctcgccgtctgtccaggggagcccggaacgggtccagatttcacccggtggcggatctcgctgtggcctccaaatgttgtaactgagtgagttatagagaaatgccacactcttagactaattcaggagtcctttattagccggcgactgagagacggctagcgctcaaaattctctccaccccaaagaaggggctaggtttctttttataccttggtttagaaggggaagagggagccgagctgaagcaattttacagaagcaaaacaggcaagaaagtgaaaaagataaatggtaacagaaaaacaaacagttccaggtgcaggggctttaaatctatcacaaggtgatagacgcgggggctttgggtgctatcaaccggacgaattcctgggaattgtggatatagcttgtcacagtatcttatcagtaatcgcattcttggatgtgctgggagtcagcttaagtccttgaggaaggggggtgggtgagagactgcaagcgaagaagccaaaatagagtctgcctggccctctcagctaagggagagtcaatcacgttaaacacaaggtagggtatcacattggaattacaggcatgagccactgcacccagccgacatcaccatccttcctgactctgaatttatatactactaaccagcaatcattttcctccacctattcaacacagaagtacctaacagtaaaagatgagagatacctatctggcatgtgagaaaatgatatatagctactgacggggatttcctttgaggatgctgagtaaacttcgtggtgtgtgcctgcatttccactgcaatctatcacatgtgatgagttgtggaatttcccacttgtggcatcacactggggctcaaagagtttcagattttggagcatgtttttttgttttttgagatgggagccttgctctgtcacccaggctggagtgcagtggtgtgatctcagctcactgcaacctcaacctccagggttcctgcctcagcctcccgagtagctggggttacaggtgccccccaccacacccaggtaattttttgtatttttagtagagatggggtttcgccatgttggccaggctggtctggagctcctgacctcaggttatccgtccactttgacctcccaaagtgctgggattacaggtatgagccaccacgcccggcctagattttggagcattttgaatttgggatggtgaatctgtactgttgttcctctccccccacaaccatcttgccgatggggaaactgaagcattgagaggtgatggaaattgctggaggtcatatagctggtgagtggcagagtggactcagaacccaggatcatctgattgcaaaatctgtttccttcatctctgtactgtgcaacaatgacaagaatactattggcgataacaacaataacccacaaattttgacttgtcattcacaacaacaacaaaacaataataacaatacattcacctctggggtcgaaacccatatcctagaatcctaggaactaaggattccctccagccacactgcagcaatgctcatttgcatagaccctctaatttgtatgcatatcattatctgcccccacccaacccaccagctccctgtgttttatgcttccagctggcttggcggattgtcattctgtcctggatgtgtctaataagggcgtcttgcgggatgtagcctctacttcctcaggaattgtggattggagaggaagccagatccagacgtgaggtctctggtttcccccacatttcctgcatggacttgagccaactgggtccaggttcctcatctgtagaatgacctccatgggtcattacctccatccctctgcctctaggagccaccacttgttgctgatggttgccccccatccgactcctccctttccctgtggggctctttaggcctgacaattcctctccacccttcttcagtttgttcccctaagaactagacagatccaggtacaactatttgccatttatttcaaagatcagtggttaagaggcccagggttatgaacaaggtctggtcctcaccccgagatgtgttagtctgggctggggagggccctcaggctgtgtgtatatgtgtgtaatgttgtgtgtttgtcattgtgatgtgtgtgtgatgtgtgtgtcattgtgatgttgtgtgtgtgtaatgttgtgtttgtcattgtgatgtgtgtgtaatgtgtgtttgtcatcgtgatgttgtgtgtgtaatgtgtgtttgtcatcgtgatgttgtgtgtgtaatgtgtgtttgtcattgtgatgttgtgtgtgtgtaatgtgtatttgtcatggtgatattgtgtgtgtgtatgtgtgtaaccaggtctgactataacttggtctgtctgtgtctaatgtaatgagtattaattaccaagtgtgacggtgacacctctgggagtggctgtgtagctgggatgctgtctgagttttgtgtgcttgtgttataacatacacacagtgctgtgactgtctgtgatgccgtctgtgacttccatgtgattgtgtggttgtgcatgaatctggcacttcgcgtgtatgagtctatagttgtgaaagagtggctgagattatgcagccatgtgacagattttgtgggatgccataggtgtgactgtagagtcattcttccttcctttcaatcagcaagcatttccctagagcatgctttgtgccaggccctgggccggatgccggggacagatccgtggtgtcctattagggatgtctatgcttggcagtgatgaaatcagccatggtggtagcatttacaccatggaaattggcaaacattacaaagctgtccccctcccaggacagctggttgttaaacagttatgagcacgctgccgtgctcatgtatctgagtgtaactctttgtgaccaggctgaggtgtggccaccagtctgtgggtgggatctgagtatgtggggtggggctgggctcttcatgatgagtcccgatgatcagtctcccgcccaccctgtccgtactcatgatgagagtagggaagtggatgaagtttcccacccccagccaagtccctggaatcccaagccccactttcttctgaatcaaaagcataaatacccacccctcaccccttcttcctgaatatcaggcaaatcaactttaccccatgtttgggggcccacagaccccaagtctctgggtttttgtccttagtattgtccgtggcagggtctgcagtctacgtgggtcttctgaaggtgcctgctggggcttcatctcgccttggtggtgcccactgagctctccgcctttgagttttgggttccctggagtgtcccccaagatctgtttcctgagttttcttttttcttcctttcttttttttgaggcacagtctcactgcgtttcccaggttggagtgcagtggtgtgatctcggctcactgcaacctccgcctcccgggtttaagcaaaattatcctgcctcagcctcctgagtagctggattacaggcaggcaccaccacgtccggctaatttttgtatttttagtagagatggggttttgccatgttagccaggctggtctcgaactcctgacctcaggtgatccgcctgccttggcctcccaaagtgctgggattacaggcgagagccaccacgcccagcctctgcttcgtgagttttctttcccctgaggcaccctctgagttctccacgtgtcagacccatgtccaatgcaccacgctccttccttcacaccatgaaagccccgaagtaagaccgggtaccatcacgcagtcgaaccaggcgttcatccagcacacggacgaccaccttctccccagcctccaggtgtaccacaccacccaggaagctgctgtcccaccagacccgggagctgctggtggcccgtccgcagggtgactgctggctgaccaacagctccagctcctcggggtagcggggtgtgcgcttgtagaggccgtgggtgatggtgctggccaggcccagcgggcagcccacaccgcccagctgcaccttggagtagatgtagtagtagccagctttggtgaccacaagggccccatcgtggtagctgaggcccctcaggaaggccaggcccagctgagtctcccataacagcggccccccgctgccggtcaagctggagttggcccctgttgggaagagagagacaaagggggctgccggtcagcacatgtcttcctctgttgcttgtttgtttgtttgtttgacacagagtctcgctctgtggaccaggctggagtgtggtggcatgatctcggcttactgcaccctccgcctcccaggttcaagcgattgtcctgcttcagtctcctgagtagctgggactacaggtgcccgccaccgcacccagttactttttgtagttttagtagagatggggttttgccatgttgctgaggctggtcttgaactcctgacttcaggtgatccacccgcctcggcctcccagagtgctgggattacaggtgtgagccaccacgcccggcctcacatgtcttactcctgctgtgtgactccaggccagtcaccactaggctgtttgtgtgtgtgtgtgcatgtgtgcgtgtgtgtgtgtgtgtgtgtgtgtgtgtgtgtgtgtttgtagaggtgggggtctcacaatgtggcccaggctggtctcgaattcctgtgctcaaccgatccttcaggctcccaagtgctgggattccagtcatgagccaccaccctgcctagcctgtttgtatgtattaatttgctttatccctgctttgcagaggagggaaactgaggcacagggaagcaaattaacttgcttagtctatatctcaactctttgcatccctcttttgcaggtggggaaactgaggcatggaaccgttaagtgatttgccaaaagtgtcaaaacttggctgggtgtggcgtctcacccctataatcccagcactttgggaggctgagacaggaagatcccctgagcccaggagtttgagtccaggagttccagatgaagtaacatagggagaccctgtctctacaaaaaacaaaaaaattagctgggcatggtggcaggcacctgtagtcccagctgctggggaagctgaagtgggaggatcgcttgcacctggcaagttgagggtgccgtgagccgtgatagcaccactccagcctagttgacagagtaagaccctgtctcaaaaaaaaaaaaaaaaaatgtccaaacatgcaagtttgcaaaaccaagaaaccaaagcggcacctcgtactcgctgtgtgcctcagtttccctctctgtaaaatgcgcatattaatagcacctgcttggaatgtaatgaattaatatgtagaaagcgtgtcacagcacataacacagcataagcactatatgagagttcattaaattaataaaactaggccgggcccggtggctcacgcctgtaatcccagcactttgggaggccaaggcgggaggatcacctgagatcgggagtttgagaccagcctggccaacatggcaaaaccctgtctctactaaaaatacaacaaaattaaccgggtgtggtggtgcatgcctgtaatcccaggtacttgggaggctgaggcagaagaatcgcttgaacccgggaggcgaagactgcagtgagccgagatcatgccactgcaccccagcctgggcaacagagtgagactgtctcaaaaataaataaataaataaataaataaataaatagaaataaaaaataataaaataaataaaactggaaatacatagcacttgcagcctatgttctgagcaactctgtgagtaaataagcaatgaatgaatgaatacactgatatgtatggcgtttatctggtcttcccgagacgccctgacccctgccccttgccaggatccagggtccctctcacctgtgagatgcgctgctgggttgacctcgtgagaccttcgctctggggaaagagggtcagaggttagagacgaagacagtggaggtaaaaagccagcctcctaaagggccaccgtgtacacctcctggaatcaaccccaccccttccggagtgacccaaacttctgcttctcaggcctgggggaggggcacctgtgaggatttggccagttgtgcaaatcatattgggcaattgaccgaggggtgggggtggcatgggaatcatcacacctccttccctggggccaggaccctgactcaccttgtatcagctgctcccaggagcctgcaggtccgtcctgaaaatgcagaaggggcctgcggtaagaacctgcagcgggggccacgccctcgcattgctcacacatggctatgagacatgaggaccatagccaccgacaccaccctcagacacgtacacagggccacatactctcacttgcagacacacaccccctgtccagaggcctcacaaccacttggtgcctcagtttccctctatgtaaatggagttacgaatcgtgtctgcttggcgtttaatgaattcacatatgtaaggcattattacagtgcttggcacatagtatgcactagagaaaggtttaataggtcgggtgcattggctcacacctctaatcccagcacttcgggaggccgaggtgggcagattacctgaggtcaggagttcgagaccagcctggccaacacagtaaaaccctgtatctactaaaactacaaaaattagctgggcctggtggtgggtgcctgtaatcccagctgctctggaggctgaggcaggaggatcgcttgaacctgggaggttgcagtgggcccagattgtgccactgcactctagcctaggtgacagagtgagattctatctcaaaaaataaataaataaataaaagggtttaataaataaataacattgcccagagcagtggcttacacctgtaatcccagcactttgggaggccaaagtgggaggacagcttgaggccaggagtttaagaccagcctgggcaacacaacaagacctcatctctacaaaaaatttttaagattagccaggcatggtggtgcatgcctgtagtcccagctactcatgaagctgggacaggaggcttgcttgagcccaggagttcaaggctgcagtgagctatgatcgtgccactccactctagcctgggaagcagagtgagacacagtctctaagataaataaatatgtaattaattaaataaataagtaatatttaaaaatacagggacaaggccaggcgtggtggctcacacctgtaatcccagcactttgggaggctgaggcaggtggatcacttgaggtcaggagttcgagacaagtctggccaacatggtgaaaccccgtctgtactaaaaatacacaaattagccaggcacggtggcggatgcctgtgatcccagctactgctcaggaggctgagacaagggaatcacttgaacctgggaggtggggttgtagtgagccaagactgcaccactacactacagcctgggctatgggagagaaaccttgtctcaaaaaaaaaaaaatgcagacagcgagatggctggacacatggacaccacccttgggatatagcacctgccacagggcacagacctcaacatcatcatgacgctgagaagacacatgtgggctcagatgcgtggacatgtggtttgtggtttatggatccatgtgcgtctacagacacagagacccagagacaaagacagacaacgtgaatacaccggctgcagctaggcgggtgtgtggacatgtgggtacacgcacatacgtccacatgggtatatggacacgaatgtgtggccaccggatccagacccaggacacaaaaggggccaagcccacaggggtatggtgttgggcacacatagacccccaggtgaggcacacagacaggcggacacatccacagccagctggaagcagaccgagaaatttccacagatggaaatggtcagagaattaatgacaatcgcagtaacagtaataagagtaccagagaaggccaggcgcagtggctcacacctgtaatcccagcactttgggaggctgaggcgggtggatctcctgaggtcgggagtttgagaccagcctgacaaacatagagaagccccatctctactaaaaatacaaaattggccaggcgtggtggcgcatgcctgtaatcccagctactcgggaggctgaggcaggagaatcacttgaacccgggaggcagaggttgcggtgagcagagatcatgccattgcactccagcctgggcaacgagagtgaaactccgtctcaaaaataaaaaagtacagagaaaatgcatgcgtgtgtgcacaggggtgtgcatggcagtgttggggtgtcagttccgacgggtggagctggcatcgtctggtactacacatgccatagcatacttcgtcccctatgaagagactgcccttattttgtagatgaagacactgaggttcagagaggtgaattcacttgcccaaggctgggagcagcaaccagtcaagccagctgctctcagcctgtgccctgtcctacacacacacacacacacacacacacacacacacacagacacacagtgacccacaatgacacaggggagcccccctcacctccacctgctctcagccccccggtcccactcacaggcaggcgggtgaccatctctcctagacgccagtgcagctgcaggaggaaccagccttggacggccagcccggcccccatcagcaacagcaagagacccagacccacccgggccacactgcacgactgtctccggtggcttcgtcccagcctcgtgaatgggatgtcggtctgtccatccaccacaaacactgagggccgtacgacactctcctccatgcccaaggtgtctggagcagggctgacacgcctgggtccttcaacctcagaggaaaccgaaattgctcaacactcctgggctgtgcacgctgcggacaggcacccgtgggccgcctttagagctggggttcagccccaccccttcccccactcaccctcctcttcttccggtacccgccgcccccggtcttggccctgtctcactctcactcatacagactctcacactttccagaggcttctgaaaatgtgactcaggtggcaagtgcagtggggagcccccagctttcccttcttggatgcttcattcgcttggggccaccaaatatcgactgaggactttctgcccatgccaggctctgctctcggtgtgggggatgcagcaatgaacaacagcaagaagggtccctgctcctcttctggtggagccagagagacaagaaacctcgtaaacaagaaaataatacgttgtgggtttttttgttcgtttatttgttttgtttttgagatggagtctcgctctgttgcccaggctggagtgcagtggcgcgatctcagcttactacaacctccacctcctgggttcaagcaattctcctgcctcagcctcccaagtagcggggattacaggcgcgtgccaccacgcctggctgctttttgtatttttagtagagatgggttttcaccatgtcggtcaggctggtctcgaactcctgacctcaagcgatccacccacctcagcctcccaaagtgctgggattacaaacgtgagccgcaccatgcccggccttctgttgtgttttgatgtgacaagtgcagtgaaaaacacaagagtggaataaaggagtggatgtgtgctctgtgtgtgtgcttgtctgcatgcatatatgtgtgcagtgtgtgcatgtgaatgtgtgtattcagttgtgtgcatgcaagtgtgtatcatgtacacatgtgcaggcgcatgcctgtgtatcatacatgtgctggcatgtaaatgtgcgtgcatatgtgggcaggtgcatgcatatgtgtatggtcatctgtgtgcatgtgcatgtggtccatgtacatgcatgcatgtgcacgtgtgtgtatgtgtgaacatgcatcacatgtgcaagtgggtgtgcatatatgtgctgtgtgcaggtgtgtgcatgtgtgtgtgcctgtgcattggtgcgtgtatgtgtgtgtgcgcacttgcacgggtgtgttcatgtgtgtggggaggtccatgtatgagtgtgcatgcattcaagcgtggatttttttttttttcgagacggagtctcgctctgtcgcccaggctggagtgcagtggtgcgatctcggctcactgcaagctccgcctcccaggttcacgccattctcctgcctcagcctcctgagtagctgggactacaggcgcccaccaccgcacccagctaattttttgtatttttagtagagacggggtttcaccgtgttagccaggatggtctcaatctcctgacctcgtgatccgcctgccttggcctcccaaagtgctgggattacaggcataagccaccgcacccagcctttttctttctttttttttttgaggcagagtctcactttgtcacccaggctggagtgcagtggtgccattttggctcactgcaacctctgcctcccggattcaagcaattttcctgcctcagcctcctgagtagctgggattacaggcgcccaccaccatgcatagctaatttttgtattatatgttggccattatatatgttgtaacatatatgttgtctatatgttggccaggctggtctcgaactcctgacctcaggtgatctgcccacctcagcctcccaaaatgctagaattacaggcgtgagccactgcacttggcttctgtcttgtttcataagtatctttgtaatatccttgattttacctcttggccctgaaagccaaaaacacttatgtggccctttatagatacagtttgctgccagcttgcccctgagcttaggctaagacacgaagtgcccttcactggggcctctgtggttggaccctcgtgcttttgctcactctgccccagacagatatcctgggtctttgcacttcctcttcctgctgctgggaaccatcttccctagatctccaaagcaggctccccctgctcatctgcgtcttgactcaagaaacttctcacaggagccctccctgaattggtcaggtgtctcccgagagacagaaccaatagaagatacacagagagatagagatgggatctataggctgggtgcggtggctcacgcctgtaatcccagcactttgggaggctgaggcatgtggatcacctgaggtcgcgagttcgaggccagcctggccaatatggggaaaccctgtctctatcaaaaatacaaaaataaaaaataaaaaattagctaggtgtggtggcacacttctgtaatcccagctacttgggaggctgaggctcaagaatcacttgaacccgggaggcacaagttgcaatgaactgagattgtgccactgcactccaggctgggcaatggcatgagactgtctcaaaaaaaaaaaaaaaaaaagagatctgtagagacagacaaagatacagagtcagagaagagacagacatggaaaactagagagacagggacacagagatacaaagacagacggagagagagagagagagagatgtatagagtcagagagagtgtgtaacacatttattttaagaaattagctcacacaatcatgggagttggcaagtctgaagtccacaggacaagccagttaggctggaggctcaggtaagaggtgacactaccgtcttaaagcctaaagcctggaaactcaggcagaattactaagttgcaaccttgaggcagaattccttcttcaggaaacttcggtgtttactcctcagaccttcaactgatcaggtgcggcccactcacattacctaggctcatctcctgtcctgaaagtcaactgtggttgttgacatgatctgaaaattacctttctagccaggtgcagtggctcacacctgtaatcccagcacttaggggggcagaggcgggaggattgcttgagcccatgagtttgagacctgcctgggcaatatagtgagaccccgttctcaacaaagaggaaaaaaagaaaaaagacaaaaaagtaaagaaatataaaatacttttctttctttctttctttcttttttgagacagagttttgctgttgttggccaagctagaatgcaatggtgcgatcttggctcattgcaacctcagcctcccaggttcaagcgattctcctgcctcaccctcccgagtagctgggattacaggcatgcgccaccaggcctggctaattttgtatttttagtagagatggggtttctccatgttggtcaggctggtctcgaactcctgacctcaagtaatccacccacctcagcctcccaaagtgctgggattacaggcgtgagccactgtgcccggctaaaatacctttctagcaacatttagactagtgttttaccaaatgacttcatatagcctagctttgttatcacataagttagccctcatgccactcaatctaagtgatcttcttaaccgctggacccactgcatgggtgaacttttctttttggacatcctcaccatccaaaatccattccacactgtcttctttttgggggagccggtgtgggggatggagtctcgctttgttgtccaggctgtagtgcagtggcccgatctcagctcactgcaaccctccgcctcccaggttcatgcgattctcctgcctcagcctcccgaatagctgggattagaggtgcccgccaccacgcctggctacttttttgtatttttagtagagatgaggtttctccatgttggccaggctggtctcaaactcctgacctcaaatgatctgcccacctcggcctcccaaagtgctgggcttacaggcgtgagccaccacgcctggccccatgctgttttcatgagtcctatcctgctcccccttttagaatgtaagtttcataagatcctatctgcaccgttcacagcctcaagtgataggttttagctcaaaataaaagcaaacacaaacaaaagcaccaaacacccccatatgttgaagaaatgaatcaaatgaatcccaaacaggagaaagggggagtgaaggccaggtgcagtggctcatgcccgtaatcccagcactttgggaggccgaggtaggtggatcacctgaggtcaggagttcgagaccaacctggccaacatggtgaaaccccacctctactaaaaatacaaaaattaactgggcgtggtggtgggcacctgtaatctcagctacttgggaggctgaggcaggagaattgcttgaagctgggaggcggaggttgcagtgagccgagattgtgccactgcactgtagcctgggggacagaaaaaaaaaaaagagaaagaaaagaaaggaggaatgaataagaaaagaaaaaagaaatgagaagaaggatgtgaagtagagtggtggtcttggcagatatcagccgggatagccagtgagttgcaaggcatttgacaggaggctttgtcatttaggagctggatggagtagggtagactgtgaatctatttcgcccatacccctggagttgtggggtgtcttaggaaaagaggctgtggaggcgtgactttcagcctcagtgggtgtttcgtgatgatgtggtgcagagctgggaggctgcatcccaccctccatacagacaccttcccagtccccaaaggaccagaggtgcagtgagaggaggtgctcagggccccagtcccctttagcaacagcgcccctgctctccaaacccaaggctgctgctccccaagcagcgctgtcaccagaaagcactttgtgtgccgtgaccacaaagcccccgcactccctccctaactgctgactcatgtcttcccctccctggggctccagccggaaacactgccctgcctgccagcccctactgcctcctctcgggttcagtcaccagacacagctcaccccaaagcatggattcttggctcaggcccatctagaaacggggtctgggagagtgaggtgaggctgcaggagggcagaagggatgcaaatgaggacaggtaaggatgcaggtgagagggcagagcaggtctgcaggttgatggtgatggcgaatctacaaggacagatgccgggggaggtgcaggtaatgaaaccgcttttgcaaaatcataactgaggaaattatgacgctgaaagaaatcagacctaagcgtctccgtcttgcttctaagcttcaagctgtccttgttctttcctgggcataggccgaactaactttgggaaggaattcagttcatggtttggctctgaaacaaaattggtaacagccctttcccgaaaagaccccctttttgcctggggaccagtctgcctttgcaggactgacaaattagctacaagattagaaattacagtttaggggccatacagcctctggctccaagagtctgaacctccccaaattgctcctggggacaacatcactattgtaaaacctaagatcagtgctccagatatgttgcagaccctgaactcaatggatcagctgacaccatcgagaccagtaatctgacccctccagttctgtgatcccacccaggaacggaagacagaaaacctcacctggaccccctatgattccaacttcaacctcaccaatcaacactcctcacttcccaaacctctacctgccaaactattattattattattattttgagatgaagtctcgctctgtcacccaggctggagtgcagtggcgcaatctcggctcactgcaacctccacctcccgggttcaagcgattctcctgcctcagcctctcaagtagctgggactacaggtgtgcatcaccacgcctggctaatttttgtatttttagtagagacggggtttcatcatgttggccaggctggtctcgaactgctgacctcaggtgatccacctgcctcggcctcccaaagtgttgggattacaggcatgagccactgcgtctggcccaccaaactatctttaaaaccgctgatccccaaatgctcgaggagactgatttgaataataataaaactctggtctcctgcacagcttgttctgcacgaattactctttctccactgcatcccccgtctgataaatcggttctgtctaggcagcgggcaaggtgaacccattgggcagttacagtaagaagataggtaaatctgcaggtgagaatgtaggtgagaatgtgggcaagaacccaagaaaatacctagaaaagcatgcaggtaaagatgcaggtgaggacccagatgaagatgcagagaaaatacactcaccggagaggatgtaggtggaaaaaggtgagaatataggtaacaatgctgttaaggtaaagatacaggtaagcttaagatagagatgtaggtgttggggccaggtgaggatgctaaaaaacaaaaacaaaaaaccctggcggggcacggaggctcacgcctgcaatcccagcactttgggaggccgaggcgggcagatcacctgaggtcaggagttcgagaccggtctggccgacatggtgaaaccccgtctctaataaaaatacaaaaattagccaggtgtggtggccgtgtgcctgtaaccacagctactcgggaggctgaggcaggagaatcgcttgaacccaggaggaggggtcacagtgagccgagatcgcgccattgcactccagcctgggcgacaagagtgaaactccatctcaaaaaaaaaaaaaaaaaaaaaaaaacagaaaaacccacaaaaacaaaacaacaacaacaaaaacccatacatggattcagctgagggtgcagaggagtgagcaggtaaagattcagatgaaaatattggtaacattgggagcagggagaacattagggaaaagacctaatgcatcctggacgtaataactaggtaatagggggctgggtgtgatggctcacgcctgtaatcccagcactttgggaggccaaggcgggcggatcgcttgagatcaggagttcaagaccagcctggccaacatggtgaaaccccgtctctaccaaaaatacaaaaattacccaggcaaggtggcgggcgcctgtaatcccacctactcaggaggctaaggcaggagaatcacttgaacccgggaggtggaggttgcagtgagccgagattgtgccactgcactccagcctgggcgacagaacaagactctgcctcaaaacacacaaacaaaaaacctaggtgatgggttgataggtgcaggaaaccaccatggcacacttgacctatgtaacaaacctgcacatcctgcacatgtaccccggaacttaaaatagtaataataataaaataaaaaaaaattggtaagattaacaggtgaggatgccggtaagtgaagaggtgaaggggctgtgagctgccggtgagtgtgcaggtgaaatggaggtgaggcgcaggtgcatgccacgtgcaggtgaggcaggtccatgctccttggctaaagaagtcagcacactagcaggcgaacgccaggagaaaatgcggtgggaacaggtgaggtttcaagtaggatggagctgagctgcaggtgaggcggctggggatttcagcctctccctcttggcaaagaactccagacacgtgagatataactgaagctttatctggagtgggggaatgggggtgtggtcagttggggcacccaaagacaaccatgctctcggtgaaggcgccgaggtcctggcattgtttctggttctcttcgtcttggcattcgtcctcctcgggccagtgctccacccaagtgtccttcccgatgatgtagctgaggctggagggaagaatggcaggtcaggaaggggcgtggtgtgggcgtggcgcaggggcgtgacaatggtgtgggcgtggcatgggcggggcagtcgggcggtcgcgcgcacgcgcagggaaagcactcacttgggcttctctccccagaaatcggaggagagaccccacatgaggtagtgtttcttctcctccagcttcagggcttctctgcacttgatggggctgatgaacgtgcgctgctgtccaacctgcacctcatccgagcctggagtggaggggagagggaagaagctgagtcgtggggaggaagccagggaagagccacgggaggcagcgtgctgagcctgacctgacttgatggtctgctcaatggccatgatgtactcgtcaaagtcattggacagctgaaccttgaccagtcgggtcttgtacactgtgggggagaggcagacagtttgggtggtgggctaggttgaccatgaggggcaccctggtttgcaagtgcacccgggcatgtggctctctctcccaagcagaaagttgcagaatcacagccagtcacactatggcccacccctcattacacacacaaccatagagggtcccatgtcaccatccacacacagtcgtgctcataggcatgcacagaggtcacagccacccacaatgtctagtaacatactattcatactatgcaatgagagtgactcatatgcacaaaatactgtagcctcatggccatgcacacaaccatagccacggaaaactacagtcatatacgtaacttcaggacctcacactcactgccatctacaaccacacagcctcacacaaccacagccacacacaactacaacctcacagccacccacgcaatgatgcatacaaccacatctaccttttctcacatgagcatacctaggccactcacagtcatggttccccacacaatcatggcccctcacaatacatgctctcacacacaccacagtcacccacacccacagcctgaagccacaccatgacaaccacacctaccacccaccacacaattggacacacacagctaaacatgcgtgacccccacccatcacccactcaccatagtccactcctggctcacaggccttgtccagccgttcttccagggtgaccttgtcatccgacttttgtatgaagcaattctctgcagggtggggtggagacagggtctaagtcccactccttatctggggcctactgcccatgggtgtggccagccctgggagcctaccccccttggtatcccctgggtatgggtctgggggtccctgaccatgggatagatgacctgggtaagtgtggcttgctcagacccacctgttcccggctccagggaactcaccctcagcacagcggcacagttcatcacggcagagcttgttcagctttccatcctccttttccggatggtagaaccgggtacagctttcctctgcgggcagatgtgatgtgaagatgagaggataagggcctccctccaaagaccatgcctgggaggcccagatccccagttctcagtcttcagacctggagatgctaggtcttcaacccctcagatccctcagaccccaagaccccctctactttctgatctttgggattctcagacccttgagtctcttagactctcaactcacagaagcctgggaccctcagaccccaaattcatagattcctgggacacgcaggcctccaaccctcatatatctagaatccttagacccttattttcagaaccccctgcaactcacatattcctaagaccctgagacccctgaacccatcagacccccaagtctcagatccctagaaccaactcatagatccttgggactctcagaccctgggaccttcagattactaatcctgaaatccctggcctgcttagaccatcattctcagatcccctcagaacctcagaacctcaactcatagatccttgggaccctcagacccgtgggaccttcatactacgaatgctcaaatccctggactccttagaccttcattctcagatccccacaattcatatatacctgggactctcaggcccctggaaccatcagaccccaggccctaggttggctgctcacccaggttgtaataggcgtagaccttgactgctccaggctggataagctctacattaaagtattggtgaactttgaaagctagacagtcatcctcagagtgtgagacctgagggggaaggaggagcttggtcagtggggtgatgtgggagggagtccagcattgtcttgggagctgaggcagtggtggagaaactgaaggatcaaggaggaagtggcaaagatgaatgagcaattcagcaaatccatttacttttcttcctagactcacagtgagactacctttctcagctcctctttcaattaggtgtggccaggtggctgaacagattgctatctatgcccataaaaacaacccatgcacaatcttatttccatctagaatgaatgaatcctgcagagaactacagaagatcctaaggattgcagagccacaggatggaaggtgcttggatccctgagagactacatggagcagagggacccttccttaccccccatgccaactggactttacatgagtgagaaatacaagtctgttgtgttaagaccccatattcttaggggttttgttttagtagctattgttacttaagctgactaaaatgggattgaggggccctgtgggtatcaggagttagcagggaggatatggggataggagaatgggaagaaataagagaagggagaggagaaagcccaaatcatggtagagatgaaagagtcagagaatgccagatggagagaaaataacagaagaggtggcaggtgtggtggctcatgcttggaatcccagccctttgggaggctgaggcaggaagatcgcttgaggccagtagtttgagaccaacttgagcaacatatcaagacccccatctctacaaaaaataaaacaatcagctgggtacttacacagaatatttatgaagaaacaagaacaaaaattcagctggggccaggcaccaggggcttatgcctgtaatctcagcactttaggaggctgaggtgggagaatcacttgagctcaggagtttaagaccagcctaggcagtacagtgggaccccatatctacaaactttttttttttttaattcactgggcatggtggcatgcacctgtaatcacagctactcaggaagcagaggtgggaggatcatgtaagcctgggaggtcaaggctgcagttaaaaaaaaaaaaaaaaaaaagctgggtacaaaagcataatatttatgaaaaaaaaattagctgggtgcagtgtcgcaggcctgcagttccagctcctcaggtggctgaggcaggaggatcccttgagcccaggaatttgactttgcagtgagctagtatcaagacactgtactccagtctgggtgacagagcaagaccctgtctcctgaaagaaagaaaacaacagaagagagaaatagatcaaagaaagaaacaaagcccaggattgggttagggaacgaggcaagaccttgctctctacaaagcacttaaaaaaaaaaccaaaaaaaccaaaagggctttttttcaatggttgtttaagactctgataacaagttggaggaggcaaatggtcagaagatgagatgtttatagaagatgctgggttgacccccttattttacaagctccttcccctacaactcagcagcacagaccctgtctcctctggcccagggttagtctgacccagagacaaaagctgaaaggaaaagaaagaccagccagatagaggtcagggtgcccctggaagcctcccaggggaggatgatgcagccttaccttgtccaggtagatgatgagggtgttcctatcggagaaggctttgtccagctcatacttggagatgtatctgtcaacaccattggccagctggggaaaggtggagcctgtgaaaaatccctcctggacccctctctccctgcagcctcttccagaacccaggctcctttccacttatcccagctcctgagcccttcatacctgcttcaggtcatctgtgtctggagcaaagccagtcatcatggatatgtccaatatagacatagtggcatcctggtctccccggtacctggatagtgcagaaagaagggcattgggtcccaaggaggggtcagccccaagggtctgttcctggacaaggaggtctgatcaggcactgagacttctgattcccacatagcagcacagaggggcgttacattttttaggaaacatttccccaaaggaaataaaaagcaaggtaatgtaatggtcaaggtgattaagagctcagactctgcacccaactgcatggattcaaattccagctctaaataacattggatgcattatttgaccctccatgcttcagttctagaaaacaaggcaagaatacaggcagccctcactctgcatgattcagttaaataacactagtagcccagtgacatggttctttttcagtaccttggtatattgatcacgagtagttgcatatggtataaactttgttgctaactcttcagtctagaaatcacgacataaataaaagataagcatcataattgagggccaattactgtcactcctttcaaagtccatcagtgattggtcactgagcttctgctcttcaatttatgcacagacagcaaagtgtgtagttctgttgcctccctgtctccaggtggctaactcccatgagattttacaacaatgtatcacgaaaagagggaactggccaacaaagataaaaatgcagcaaagaaatgaaaagtgataatgccagaagtgaacttcaaagacagcataaatggagttatcaaagaatagcagactatggtgatgttgaccctgctgccatttgagagataggtagtgtagaggaactcagggaaggcaaatgtattagcataaataaggaaggtcatggggacaaaaaggatgaagatgtcccagaggaagggacattatagaatacaaagtcactttaaaggaactcttggaggaattttgtgtcatggaaagctcaaaggataaaatattggaagctgatccaaacttagaaaggagcaagacaaggtactaaggcatagaaaagatgtttactccatgttgtaaattatacaaagagaagaaggcaagcatttttttgaactaaagtactctccgtaagtgtcatacaaaggaaaaaaaaaacaacaaatacaccttgcatctcaatgttctaatgttttaaattacggtgtagtcaaatactcatcttactatgaatttcatttccctgtatctttattttgttttattctattttttttttttttttttttttgagacagagtcttgctctttcgcccaggctggagtgcagtggcgtgatctcagctcactgcaagctccgcctcctgggttcacgccattcttctgcctcagcctcccaagtagctgggactacaggcacccgccaccatgcccggctaatttttttgtatttttagtagagacggtgtttcaccgtgttagccaggatggtctcgatctcctgacctcgtgatctgcccgcctcagcctcccaaagtgctgggattacaggcgcgagccgccacacccggccatttccctgtatctttataactggcagtatgataattttaaatgttgtaatagaaacatttaggctgggcatagtggctcatgcttgtgatcccaaaactttggcagcccaaggcagaggaatgctcaaggctaggagttcgagaccagcctgggcaacacagtgaggccctgcctctagaaagaataaaaaataaaaatcagccaggtgtcatggcacacgcctgtagtcccagctacttgagtggctgaggcaggaggatcgcttgagccagggagtttgaggttacagtgagctatgattgtgccactgcactccagcctggctgacagagcaagaccctatctctctaaaaagaaaaaaagaaaactttaaaggtcatggaatgattgtgtactttcctccattgattactaagatgctttgacagtctcagcttacgtggtcattgctgtggtctcacattaacatgcaaagcaaggactgtctgtgttgtctacctcatggtggatacttagaacagtatcagatacacagtgtacttggaaagtactgaatatcatggatattatttgcaagaattcttgctagagatagagggatggccaagatgaaccccggtgacctagcttcttacctggtacagatctcaaggatcatagtgttcttggcatcctgaggcctcttttctagaaacacagaagagagaaagatgggagagggtatacctgtgtgttgattcaggagcggggaagacattagaagaggggtaggaggaaggtgacagataaggccttgattccttttacctgtttccggtgctggttttatggtgaccttgaggtcgaatttattacaggtgagttgatctttggccttagcatggtacattgtcaccacctggtaagatgggagaggagacacaatgtcagcccacaggactaggactgctggggacaagaggagatggtccctctggggcagaggggcatgggccaggcaggtgtgggtttctgttccttaccgacaaggtgccttggccttttccttcagctgtgactgtgaaaccctcattttccttggtctgcagagtgaaaagagagaagagagcatgttgggaattaagccttctgctgcctgtgatggtcacctggccctccctcttgcttcccagtaaaccctggctagtgtagggggagacagccagagtgaggagggcttggctgggtgactgtacctcttctgatcgcaggaggctggcagattcccagtggatacggtgggtgatcttggagctgcggctgggcagttggagggacacatcaaggttcagttcctggtggtcaggggcgtccttttggtattgagccaaggcttggaacaccatgaaggtggcctagaacccacaagagagaaagatggtgatctgggagcctgggaaagtggctagaatccagtgggggataaagaggttcaaatcagagctgggacatcaaaatgtggcctagaacctactagagagtgcaggggtgataactggaggtcactggactctgaggacatgttcagaactctccgagagacagaaacttacaccaggacttggagatgctgagaacatgtctagaatccatcagaaagtccaaatgtaagactgaatgtctagcgaccctgaggatgcagtctagacccatcaagaggagagagtcttagaccagggcttggagacactgagaatatgtctagaacccactcatgaagaacagaatgaaaccgtagccagaggatactgagcatataatctacaacccaagagtgacactgtaacactgagaacgtgagtgacagaccaccagaaagaaaggaggccaactggagcctgaagttgctgaagcctgaagttactgaaaccatggcctagaagagggtttgcgtaatgccccagggtaactgggaacatactatagagcccgccagtgaggcaatgtgacattgggagcctggtagaactgggaacatggtctagaacccaccagcaagacagggtaagattgtgagatagaactgggaacctggtctagagcccaccaggtggagagagaggcttagacctgaacctgggccctgagaacatgatctagacacctggggcaagaagaaggctcaacacacagcttggagtacccagattgtattctagaacctatagatgggtttgcaagtaataaaaactgattctcaactccactgcaatcacactggctcgtgggaatgaagaactgcctcgctgggcctcagtgtcttctctaggaggccagtgggaagccgcaggagacagggatgcatgtgcctaggggctgtgggcccacttgcctgggtagagccatagccaccaccgtagtatctctgttcattgagccaacgcacgacgggaggcacaaagtcaaagtcttttagctgcagtagggccaagagggcataggatgtggcctccacgttgtagagctgcttaccagggtcctcccagcggttcttatctgcaaagaagataccccatccccagtgctcactgctctgtccagcctggggatggctcagagaaagctcagaaagagatgcatgctagacttcctggtgtttgggtgtcctggctgacattcgaggctctcaattacttggctcctgccttacctctcttgtttcatcaactctcacttctccctttgaaatgaatgcttaatacgcatttgttgaataaatgacgcaacaaactttctcgtgtggtttacaatgaggacctgcgaaaacttagagccgtgcatcccagctcagctcagggttatgcatcccagcttgataccttaggactatccatctcagcttggcttagggtcatctgtcccagctcagctaaaagccatgcatcccagctcagtatctcccgccctgaacttcagccatgcatctcccttcacccctccaggccaaccctcacctttggctgtggtcagaaatttgttaagaagaggccccttcagcctgcccatctgggccagagcatagccagcaatggccacagtgtaggatctctgtaggttcatgtagttggcttcaaggaagtctcctgctttagtgatgctgcctggcaggctctatgagaaagaggatcagattctccggtcatgtgggcattgctgtcacgttagtaaggatcattcgagcagcacttcctgagcatcagggatttctgtccttgggacacacctgtcttagatttgtccatttttgagaatttcccagatattttagccaccatgagctgccttgttgctgcatatctattatgtatctggagaaatccacgtaccccgtggtgtgctggtaaaagtttaacagccagctctccagtgggagggttgagggatccttggtttataatgatttacaatttctgtggtgtaaatactcccaccaggggccaatttcacggtgtcaatgcgacatcactgaacaaagtcctggggagacattctccaaattgttactcataaactagtatgcgccagattcagtataccactgtgaacacctcatccagtcatcatcatcatcgtcatcatcatctttatcttcttcatcatcatagctcacacttactttgtgtcattcagatacccacacatttaatctcataaaacctgatgagcatactgagccctgagagatgcagtaattttgcaaagaccacctaggaaataagtggcagagttaggatccaaacacagccttctggggatgggggaagacatgatttgtactgttttctcatttccatgatgtaaatacttccatcactgatttcaacctaccaatatggtgtcgttgaatgtagagttgggaagagctttgcagtaccacagtattatatagtattttcactatacagatccaacagacataagtaaccccaagagtatagattatgggagtaaggcgtttaggaagcgatgagtttgagtgtttctaacctttgtgtttaatataatttatttaactgtaacttttataactttgtttgtttggttggttggttgggttttttgttgttgcttttttttttttttgagacggagtcttgctctgtcgcccacgctggagtgcagtggcgcgatctcggctcactgcaagctccgcctctcgggttcaagtgattctcctgcctcagccttcccagtagctgggactacaggcgtccgccaccgcgcccggctaattttttgtatttttagtagagacggggtttcaccgtggtctcgatctcctgacctcgtgatccgcccacctcggcctcccaaagtgctgggattacaggcgtgagccaccgcgcctggccttttttttgagacggagtctcgctctggcccaggctggagtgcatggcgcaatctcggctcactgcaacctccgcctcccgggttcaagcgattcttgtgccttagcctcctgcgtagctgggattacaggcgcccccctccaccatgcccggctaatttttgtatttttagtagagacggggttttgccatgttggccagggtggttttgaactcctgacctcaggtgatctgccggccttggcttcccaaagtgccgggattacaggctcactgtgcctggcctaatatttagtttttaataataattgtatttaatgaccagcttgaaaaattcctggaaatttaacactgggctccagcaagctagttatagcacactttttttttttttgaaaaggagtcttgctgtgttgcccaggctggagtgcagtggcgcaatctcggctcactgcaacctccacctccctggttcaagtgattctcctgcctcagcatcttgagtagttgggattacagcacactcttgaccccaggagtctggtttcacagcctgtgctatactctgctacaatgttgctatgttgtagcagaaacaaatctcttttattcctgcccatttgcctctctgacatccactccttttgtaagaacttcttctcccttccattcacgtggccacagtggaaacagccatgtctgccccctgagacctacttcctgtccttagctgattggtccagatatagtcatctgacccaggctgagccaatcagagtcctttcctgggaatatggcggccctaaccttgatctgatattttctctaaggaaggcagccatattctgcctgaactgaattattggccaagaacggaatgaagatcacgggagagaggagcaaagcatcctggcagagtccctgaggccaccttcatctctatttgatgccttggtgcctgcacataaattccccatcaatttttgtataatctgggtcacatgtgtgttatatctgggacaactcagaggcctaaaaatacagagatcgttatttattatccccaatttacagatgcacatcctgagtgaggctcaagggtggaagtgcccatgagtcaggatttgaagtcagatttgtctgaccccacctctcctctctctctctctctctctctctacctacctccctccctccctccctccctccctccctccctctctctctctctctctctctctctctgccttggtccctcttgggtgttagaggcaacagccctgtgtttgtttttctcttcactggcccctcccctccatctcttttcctaaggggggagaagccactagctgagggtggaatcctgggcttcccacttggaaagctaaacgttaaacaacccactcaaaaccccacgatcagctaggtgcagtgactcacgcctgtaatccgagcactttgggaggctaaggtgggtggatcacttgaggtcaggagttcgaaaccagcctggccaacatggtgaaaccccatctctactaaaaatacaacaattaggctgggtgcagtggctcatgcctgtaatcccagcactttgggaggccacgccaggcagatcacctgaggtcaggagttcgagaccagcctggccaatatggtgaaacctcatgtctactaaaaagacaaaaattagccgggtatggtggcgggtgcctgtaatcccagatgctctggaggctgaaacagtaaagtcccttgaacctgggaggcaaagggtgcagtgagctgagatcatgccactgcattgcagcctgggcgacagagtgagactccatcacaaaaaataaacaaacaaacaaacaaccacaataaagcagacaaaggcattccagactctcagcggcccatctttccaagcttccctgcttcagaatcaaaaccagaggaaaaagagacagtgatgagccaacagtgttcaccgtttcctgtttggagtcacggatccctttgaaaatcacctgaaagatcctctggactaaggaaatagtcttagctctgtatcccaagttttctttaaggaagtagcaagtacgcaactgtactgatcatgtagcactgatgtagaaagcacttttggaaatgggctgaaaaccctctgaaaattgtaaggcagacagaaagaatccccacctttgatctctttgtgcctcagttttctcatctgcaaactggggataataagagtgacttacctttcaggctgctaaaaggattatgagacttaacatgtgaaactattagagggcgggtctgtattagatgagttaagtgctcaaaagatgttagctattaacatgactgcagtgatgtctgttattgcactgggagagctgcaaattccctgaaggcaacctctcactctccaaggtggctgtgctctgcatcgggtaaggtagggtagggtgggaagatggagggcacttacgttgacctgctcctcgcaaatatctttagcctcctgcagcgagatgagaacaaaggccgtgagggccatgtctttctcgttgttgttccgtaatccaccctgagatagagagcagaaagcaaggatggggtcaccggtgtgtccacacatggcagtcatccccccttgcagattcagaatcagggggtctgggcagggctgagtctcttctaggtgttaccccgctaccctaggaaggtcaaacttcttagtattaattcatgcaacaatttgttccttctgcaaatgtcaatgtacaatgtgcaatgtacaatgggtacaacggtctgatccattgtaaaaccagacacaggctctagccctcacagagcttttgtctagtagggaagatggacatggtccatccagctcctcaagagatatacactttttttttttttttttgggacagttttgctcttgttgcccaggctggagtgcaatggcgcaatctcgactccctgcaacctccgcctcctggattcaagcaattctcctgcctcagcctccgaagtagctgggattacaagcatgcaccaccacaccaagctaatttttttgtatttagtagagatggggtttcccctgttggtcaggctggtcccgaactcctgacctcaggtgatccacctgcctcggcctcccacagtgctgggattacaggcatgagccactgcgcccagccaagagatatatacttataagtggatgagttctgtgcaagggaaagaggacatcgcagcgataatgaactgtgggagtgtgacccagttggggaggtcagaaaaagtgtccctgagggagtcaactctcacagacggcagggattagcatactaggtggcagaaacagcatgtgcaaaggccctgtagaacaatagagcaaggctcctatcaatggatggagcctggaaagaaaagaaaggctggaagtctggaagcctgaaaggtgagactgaggcagtgattctccatctcaagcacacattagcatcacctggaggaatgcgggcacttttaaaaactcagattcctaggccgggcgcggtggctcatgcctgtaatcccagcactttgggaggccaaggtgggcggatcacctgaggtcaggagttcaagaccagcctggccaacatggtgaaaccccgtctctactaaaaatacaaaaatcagctgggcatggtggagcgggcacctgtaatcccagctactgaggaggttgaggtaggagaattgcttgaacctgggaggtggaggttgcagtgagccaagatcgggccattgcactccagcctgggtgacaagagcaaaactccatctcaaacacacacacacacacacacacacacacacacacacacacacacactcacacccctcagattcctgggtcctgcccctagaatttctgattcagtgagtctggggtccggtctcagaatatgttttgtttttgagacagggtctcactctgttatcagcctggagtgcagtgtcatgatcatggctcactgcagcctcgacctcctgggctcaagccatcctcctgcctcggcctcccaaagcgctgggattacaggcatgggccgtcgagcccagccacagaatgcacatttttagtaagtcatgggtgctgttgctgccgctggtctgaggatcacacttcgagaaccagtgctcgaaggagttttgtgtttaagtgccacagggggagccacgggactttctaagaactgatccagctggatttgaaaaaatcaccccaactgctatgtggtgagtgtctgagagccaacaaaagtgggaggccaccaggatgatgaccaggaggtggtttctacaaggtctccaaataaggaggggcggggagagtgttgcttggaccaggggctggccataaggatggagagaaggaggtgattcttataacatcatgggagaatgcaggtgttgatggattgaatgtgagaaagggattcccaggcaggacccctgcacttggtttaatgaaattcttaataatttctgagcgaggggccgtgtctcttcattttgcgctgggcttcgcaggtctctggtttttgcaatgctggagtgacgcctctggctcatatatctgcctgcccccaccccccagcccaatctttgcaaagggaattgggcagtgggcacatggaggtggggctctctctcgtgttcatcctgcgagactcaggagcccctctcttccattttgccctaaatcccagcctcttacaatcatttcttggtgtatcacgggcgcatcctcctggaagaccccgtcgggcttctgcttctccaggatcagccatttaacagccccgcagaggacttgggagtcgatggcgatgaggttgacagccagagagaagaccttgaccacgtaggcggtcagcctggagtgggcacagagcatgagccaatcggctctgagatccagagactgccatgtcaaccagccaatgagcgtgggggagggaccagggcctggcccagtttgcctggtttgccttcccaggccccaggacccagctgttgtatgcggtccgtgcttaaggatgcttaatgaccgccggccactcagccagcgcttgcctggactctgcaggtccagggctgtttgggcaaggctggcctaagggaccacccctggccagggtccgggccctgctgggggttgagggtggggagtatgcatggcctgagctggctgttgggactcaccaggtgctgggtgcccgtttcacgaaggccgcaaaggcagagctgggttgtctgaaggccagctgctgggtgtaccctgcagagaagagagaggaacccccaaaagagccggggctgagcagagggggcacgccagaaagggcaggggcggggtgcagagaggggacaggggctcagggtggcggaggggttctgggaggaggggaccttaaaaagggaaggactcaaagagggtgggggatcagaacgaggaggtggaaaagttctcaagaggacaagggattcagagaggagaaggatattgagggtggggggctttcagggaggggagggctctcagagagggggtggagtctcagggaagaggcatggcctggagaggacgtggggcctcagatgagagtggctgggacaggaggtggcgcctcacagaagggtgtggccttgagaagatgtggggacccaggggatgggcgtggccttgaaaagaggcagggtctcgagattctggcctgggaggagtcagggcctcagagggcgtggccttgagaagaggtgggaggccctcaggggatgggcatggccttgaggagaggcggggtctcatgaagagcctggcctgggaggagtcagggcctcagagggcgtggccttgagaagaggtggggggccctcaggggatgggcatggccttgaggagaggcggggtctcatgaagagcctggcctgggaggagtcagggcctcagagggcgtggccttgagaagaggtggggggccctcaggggatgggcatggccttgaggagaggcggggtctcatgaaaagcctggcctgggaggagtcagggcctcagagggcgtagccttgagaagaggtggggcctcaaatgaggggagtggctaggagagaaggtggagcctcaggggagggcgtggtcttgagatgaggtgggatcttaggggagggatgcgctcggaaaggggtccctggggtctccaagaggggcagggagcccacccttcttgatgagctccaaggccccctgccgcttctctaggccgaacttctcccactgctccgtttcatccaggtaatgcacagcgatgaccgtgggcgtcatgccgatcatgttctgttccccgcagcccgagggggtcacaatgaggtgcttcagccgttccgcgtcgacggcatcctctgtcatctgggccactggggtccctgcagcaggtgggaagaggacgttgctcaagccaggtgggtgacccaccttggggtggcgtgaaaagggttccagcctcccaaccagccagggccaaggggttagggacaggcgaggactggggaggatgtgactgcggggaggggaggctgcatggctgagtggctgttcgggggtctgcactgttaggagtgggaggtgcttcacaggggcaccctggtccttgggtctcatttcaccagcagtaaaataattccagtaacaatattcaggaatacttatatcacgcttaatgttactttccagactgttctaagagaataccatagagtgtctcacttaatagtcaacgaggctgggcgccgtggctgaagcctgtaatctcagcactttgggaggctggggtgggtggatcacctgaggtcaggagttcaagaccagcctgaccaatatggtgaaacaccgtctctactaaaaatacaaaaattagtgggcatggtggcgggcgcctgtagtcccagctacttgggaggctgaggcacaagaatcacttgaacccgggaggctggggttgcagtgagccgagatcacgccactgcactctagcctggcgacagagtgagactccgcctcaaaaaaaaaaaaaaaatcatcacaccaacccttggaggtagatactattattctacccctaccaaaggtgaaaaaaccaaggctcttgccccaaagccttatagcttacaggttgcaagtccctttctttctccagtcttccctcctggggcaagaaatgacctccagaatttctgctcttgtactatgttgcttgtctttttgtttgtttgtttgtttgtttttgtttgagacaaagtcttgctctgccgcccaggctggagtgcagtggcctgatctcggcttactgcaacctacgcctcccacgttcaatcgattatcctgcttcagcctcccgagtggctgggattacaggcatgtgccaccacgcccagctaacttttgtatttttagtagagacagggtttcaccatgttggccaggctggtctcaaactcctacctcaggtggtctgcctgcctcggcctcccaaagtgctgggattacaggctattgagtctcatttaagctggtttcccatctaagaagcacagaaggtctagaaaaattaaaataaactgatgtatcagcgaaagctctttgctgaactaaatgctatctggaggcttctataaaaccgatcatagcaaataatatctgtatggttaaaaaaatttttaggccgggcataatggctcatgcctgtaatcccagcactttgggaggctgaggcgggtggatcacgaggtcaggagatcgagaccatcctggctaacacggtgaaaccctgtctctactaaaaatacaaaaaaattagccgggcgtggtggcgggtggctgtagtcccagctactcgggaggctgaggcaggagaatggcgtgaacccgggaggcggagcttgcagcgagctgaggtcgcgccactgcactccagcctgggtgacagagccagactctgtctcaaaaaaaaaaaaaaaaaaaaatgtaaaagagggaaaacagatcacagatgggctgttctagctgaaggggaagagaaaggtgcgggttaaacacctccagaatgagatggaatttggctccatccatgccctcctgggacccatggggtcggggtcaagggtgtctcaccttgcaggagaattctggtctcagactcggtgtccgggacttggtcactgaggtctgcaggtgggatgtcctctttctgcactccttctgcagggtgagtgagagataccgatggctctagctccctcccgccctatcctacctcactaaacccaggtcatttaccccccttaccctgccagcccctcagcccctccccctgcagccgactcaccacggcccaggcgttctggatccagggtgcgaacagccacagttttgttcattctgattccttccggctacgcagtgttagaggtggggggagtcgttggatgaataaaagaacagacagacacacagatggtcagcagggcactgtccttaggatcaccctagcattgccgggcgcggtggctcgtgcctgtgatcctagcactttgggaggccgaggtgggtggatcacgaggtcagaagatcgagaccatcctggctaacacagtgaaaccctgtctctactaaaaatacaaaaaaattagccgggcgtggtggctggcgcctgtagtcccagctactcgggaggctgaggcaggaggatggcgtgaacccgggaggcggatattgcagtgagctgagatcgcgccactgcactccagcctggggaacagagtgagactctgtctcaaaaaaataaacaaacaaataaataaataaataaaaaatttcaaatcgagtataaaaaaattattgattggtgatggtcgacgaggtttttggcaccacctaaaattctaagcctggggtcatctcactcactttaccccaatcctggctctgcttctgaaattctgggacttccaaatttcctaagctggacactatgattcttagtgtctcagagcctggatctccaacctgagtcaatagtacgaagaccaggagccctctctgaaggacaagggtttgtgggtgccccaagcactcaccacgaccttcagggacttcctgacaccgtcactgatgaaatgatggtagacagcagccttgacttccacttcctgcaggccggtctttagcggcacgatgacatatggaacggacaacgaggacttgggggggatggttacggtctgctggtgacgcctcttggtggtggccaggctgcagaaggctggattgtggagtagttccaccctcacctgccagggagagaaaggatccgggcaagtgtgtgtgcaacaggctacctaccccctggcagcctccaagaagcctctgccaccccgggacccaccttgagctcttggttctgccggtaattgtagagaacggctcggatttccacctgctcgtttcgaacaacagagtagggtagccgcaggtcgatgaagaagtcctgcattactgtgacctcgaaggggtctgccacacagatccctgctcgggcagagacagaacacggagtgtcaaggtcggggagtggacaaggccaggctcctgggtctcagctcttagtccactccgcaggagctctccctaactcagcctgtctttgctgaagcctgtgaactaaacgctgtcaatggcgacaaatgacagatgatgatggtggtggctgggagttaccattatttattattattattattattattattattattattattaattatttgagacagagcaagactctgtcgccaggctggagtgcagtggcgccatctcggctcaacgcaacctccgcctcctgggttcaagcaattctcctgcctcagcctctcgagtagctgggactgcaggcacgcaccaccatgtccagctaatttttgtatatttagtagagatggggtttcaccatgttggccaggatggtctcgatctcttgacctcacgatccacccgcctcagcctcccaagtgctgagattacaggcgtgagccactgcgcctggccggagttaccactatttaatgatttacattctgtttgtagtttgactcagagatctacgtgtagggaggaagagaaatctccaaaatatatctgcttgtctgatatggtagccccaagctgtgggggagcgctgagcacttgaaatggggtttgcctgagtgagaaactggatttgtacttttatttgatgtacttgtatttaaatgtatttaatttaattcagacttaaactttaaacctgatgatctagctaggtgcggtggctcatgcctgtaatcacagcactttgggaggctgaggcaggaggattgcttgagcccaggagttcaaggctgcagtgagctatgatcgcaccactgtgctccagcctgggcaacagagtgagatcctgtctgtaaaaccaaacccaatgaaacaaaacaaacaactgatgctcattttaaatatatgaaacaccactgaattatatattttattattttttatttatttattttttgagatggggtctcgctctgtcacccaggctggagtgcagtggcgtgatcttggctcactacaacctctatatcctgggttcaagcaattctcctgcctcagcctcctgagtagctgggattacaggcacccacccgcatgtcctgctaattttttgtatttttagtagagacagggtttcaccatgttggccaggctgttctccacctcctgacctcaggtgatctgcctgcctgggcctcccaaagtgctgggattacaggtgtgagccaccgtgcccgacctgagttgtacattttaaaagggtgacatatagtaagtgaattaaatcttaattttttaaaaatgatgattgagtggaaaacgtttaagtatttttgcaactacttgagtatgaggatctaccttttctttctcttttcttttcttttcttttttttttttgtagagacggggctttgccatgttgcccaggctggtctcaaactccgacctcaaatgatttgccggcctcagcctctgaaagtaatgggattacaggcttgagcctttgcacccggcctgagaatctaccttttcaactgtaaattttatgaaacctaaaatacagatcaaagtatttccagtgaaaacctagcatcctgcgctgggcgcggtggctcacgcctgtaattccagcactctgggaggctgaggaaggcagattgcttgaggccaggagtttgagaccagcctggccaacatggtgacaccctgtctctactaaaaaaagaaaacttagcatcctgtttacaccactgcactccatcctaggtgacagagcaagctcctgtatcaaaaaaaaaaaagaaagaaaatctagtatcctaaatgagatgcactgaattgtaaaacacatgctggattttgaagacttagtgcaaacagaagtaaaatatatcatcagtaattttgatatactagtagattattatcaaatattaaaaggttatagtcacattattagtgggttgtggttttgcaactttttacaaaatgttgaaatgatactattttgggtatatttaaattaaatagaatgttttgtaataagttatgatatggtataattatagatatgtaatcaataataaatgatacatcatttatattatatatctaataaaatatacattatatatgttaacatgtcaacaataacaaatgacatattagtagtaaattataattatacattacaacaaaattaaattataataaattatggtttattataatgtattaaattataatgaattatggtttattataattcattaaattatattataattaaatttcttataaattataatacatattatatgtttacataatatattacatgtgtaatatgtatatattacatatatattatatatgtaatatacaatatataatatattatatatgtaatatgcaacatataacatattatatatgtgatatgcaatatatattatatgtaatataacatattacatgtaatatgtaatatatgatatatatgtaatatgatatattatatatgtaatatatgatatatatgtaatatgatatattatatatgtaatatatgatatatgtaatatgatatatgtaatatatatgttatatatgtaatatataatatatgtaatatgatatattatatatgtaatatataatatatgtaatatgatatattatatatgtaatatataatatatgtaatatatgatatattatatatgtaatatataatatatgatatattatatatgtaatatataatatatgatatattatatatgtaatatataatatatgatatattatatatgtaatatataatatatgatatattatatatgtaatatgtggtatgttatatatgtaatatgtggtatataatatattgcatatgtaatatgtgatatgtagatatgaaatatattatgtaatatataattatatattataattataaacattacaattaataaatatataaataaatattataattaaatttattataaattataataaaccatataaattatggctggatgaccgagtgagactccttctcaaaaacaaaagaaagaaagaaaagcatcaattttagagactgtacccccaccctgtctagcttttgacactgttagagtaggcagataggcggaaatgagcaggcaggggagctttctgggaaaagaagtcccagacaggctgcctactgacagcgctgctcactggcagtcagcgaaaaggacgatggctactttagctacacatggccttgtggttggggtcctctggccctgaaggggacttatcaggtcctagctggaaataactttgctagggattttccccgatgatgagcatgtgcactgctccgaaaacaccctagagttgtgttttgctcattatcatagtaaaaaacacacctctgggtggagattttcgatgctaatgagacatgccacgtgcatgctagtacctacagccacagagcctgctcgcccaaagagacctcccaaaacatgcttacaagtgacacccactcacgccccttcacgaaaaatcatgtaagagtctcataaaaagagtctaccagcagtatctgctgctggctcgttctgttgagcagccatgtctgtgtcgtctttcagagcatacggtcactttttatttatttagagaaggagttttgctcttgttgcccaggctggagtgcagtggcacaatctcagctcaccgcaacctccacctcccgggttcaaccaaatctcctgcctcagcctcccgagtagctgggattataggcgcccgccaccccctgcctggctaattgttttgtactttcagtagagacggggtttcaccacgttgaccaggctggtcttgaactcctgacctgaagtgattcccctgcctcagcctcccaaagtgctgggattataggtgtgagccatcgaggctggccctgtctctttaaataagcattgctactactatttttccagggggaccagcccagagctgtttcttccttcaataaactctgctacttaacccttgctatgtgactcttggctgaattctttcttccaagttagacaggaactaaggattcccacagttcctggtaacaacacctctgtggtaaccagggcagagaataaagtgccaagaaacatagggttgattgagtttggataaaatgagatgacactcagacaccctggggtccctgcctcccggggaccagccagcatcctctctcacctttcttgtccgacatgctcacagccagaatctcccacgtggtgatggagtctttcaaaaatatattcatgagcttcgtagagattctggatggagaagaggttggggtattaggagatgtcatctagcagggtggtagaggggaagaactggtgcagagggaccccaagggacaggctggaagggtctgggggtgcctccatgtaggtcacccaattcctgatttttctaggttgggctgtggggttgcactgtgattccagagaagaccagagatagcaggtgcatgcaaattaaacggtctgactctggggtgggttgtaccgggggtaccccggccttacccatttttcggtggctctttcaagtcctcaacgttccacagccagctctctgggaactcacttcgggaaacgatgttctcttctgcaatgatgtcctcatccaggttacctgcagggggtttagatctgcatttagaacagagcaggccagttgccatggctcatgcctgaaatcccagcacttagggaggccaaggcaggtggatcacttgaggccaggagttggagaccagcctagctaacatggtgaaacccatctctactaaaaatacaaaaattaaggctgggcacggtggctcacccctgtaatcccagcactttgggaggctgaggtgggtggatcgcttgaggtcaggactttgagaccagcctggacaacatggtgaaaccccatctctactaaaaacacaaaaattagctgggtgtggtggcgcgtgcctgtgatcccagctactgtggaggctgaggcagcagaatcacttgaacccaggaggtggaggttgcagtgagctgagatcacacgactacactccagcccaggcgacagagacagactccatctgaaaacaaaaacaaaaaacaaacaaaaagagagccgacctacttcctcagcggtcacacctttagatcctacctctgcccaggagggattcctagcagtgaaatacatcccggacatggaggacttcaggatgaattttcacgagccccagacacatctgccttgggaacttcttctccataaaaagaactaaaaattatatcccacaaatgtactggtataaggacatatacaatgcagactggattatagtcattcctttccctttgatttttaaagaaacgaaagcatttggccaggcacagtggctcacatctgtaattccagcactttgggaggccgaggcgggtggatcacttgaggtcaggagttcgagacagcctggccaatgtggcaaaaccgcgcctctactaaaaatatgaaaattagccaggcttggcagcgggcacctgtagtcccagatactcgggaggctgaggcaggagaatcgcttgaacccgggaggcagaggttgtagtgagccaagattatgccactgcactccagcctcggtgacggagtgagactccatctcaaaaaaagataataataaaagaaagcaagcatgtgcatgtggctctaaaggatcaccgtcccgagaaaccgtgtctgcttcctctgagggatttgtccattctgaacatgactaggtgagctgagaacattcccagacctggtgcagaacactgaagaagcggtggcctttaaaaaccacctaatacaaaaattagctgggtgtgatggcatgcgcctgtaatcccagctactcgggaggctgagggatgagaatctcttgaatccaggaggcggaggttacagtgagccgagactgcgcaactgcactccagcctggcgacagagcgagactccctctcaaacaaacaaacaaacaaacaaaaaacaaagaaaaaaacacaaaaaaaatctcgataggctggatgtggtgctatcatcccagcgctctgagaggccaaggtgggaggatggcttgagcccaggagtttgagaccagcctgggcaacacactgagaccctctctctacaaataataatttaaaaattagctgggcatgctggcatgcacctgtagtcctagctactcagaaggctgaggatgagacagaaggactccttgagcccaagaggttgacgctgcagtgagctgtgatcgcaccactgcactccagcctgggcgaaagagcaagatcctgcctctaaataaatatataaataaacaaaaacagcttgacactaccagcaagtaaatgaaattggactggactaggctttgactcaaactgcactttcctcaaacatgatagacaggctttaattgggttctggatctccataacaacaaagtagctggaatcccttaaaaaatatatatattttaatatttttcagccaggcacagtggctcatgcctgtaatcccaatactttgggaggcggaggcgggcagatccccgaaggttgggagttcgacaccagcctggccaacacggtgaaacctcttttctactaaaaatacaaaaattagctgggtgtggtggcaggtgcctgtaatcccagctacttgggaggctgaggcaggagaatcacttgaacacgggaggcggaggttgtagtgagccaagattgcaccactgtactgcagcctgtgtgacagagcgagactccatctcaaaaaaacaaataataataatctcagctactcaggaggctgaggcaggagaatcgcttgaacccatgaggtggaggttgcggtgagccgaggttgtgccactgtacttcagcctgggtgacagagcaagattccatctcaaaaaaaaaaaaaaaagttttcgtccgtacaaagtctcactacgctgcccagactgctctcaaactccagagctcaagcgatcccgctgcctcagcctcccaaagtgctgggatcacaggtgtgagccactaagcccagcccaaagtagatggaattcctaaaagagatacctgaatttactcacactctggaataatcaatccaagtgtcttgggatagtaacatttagccattctttttctgacccccaatgggccaaaggaattacacaattctggagaaaagtacagcccaccatccatgtggatgtaaaccatatttcagtagaccagactttttgtctaattttcccagtgaccctcacactatcgcctctttgtgaaggagatcattctaaatttgcttgaattttttcttttcattttcttttcttttctctctctttttttttttttcttttttgagacagggtcttgctctgttgcccaggctggagtgcggtggtgtgattttggctcattgacgcctccatctcctgggttcaaacgatcctcccacctcagcctcctgagtagctgggactacaggtgtgcacccccacacccggctaattattttattttatttttgtagatatggggttctgccatgttgcccaggctggtctcaaatttctggactcaagcaatccacccttctcggcctcgcaaagtgtgggcattacaggtgtgagccaccgtgcccggccaattttctttttcctttctttttttgttttgttttgttttgtttttgagacggagtcttgctctgttgcccaggctggagtgcagtggcacaatctcagctcactgcaacctaaacctaccaggttcaagcgattctcccacctcagcctcctgagtagctgggattacaggcgcctgccagctcgccaggctatttttgcatttttagtagagacggggtttcaccatgttggccagactagtcttgaactcctgacctcaagtgatccatccacctcggcctcccaaagtgctgcgattgccggtgtgagccaccatgcccggccaattttctcttattataagataaatttctctttgtttcacttaagacttatttcacgtgagatctaaagtctcacctgattcaaaaactgaatgcatgcatgaatgaagaagggctgcctgttcactcatcgagtttggcaggtctttctggaatgccacacaaattagttttctctggtgaagccaaacttggaactcaccttagctttcccattggtaattagtgtgtgaccagccccatcatctttctagacttttccctcagacctccaatgtcctgggcactggtgatgtccaattcagactgatgggtggggctgggatgaccttcccaggcaggaaactgctctgccttcaggcaagggcccttctccccatcagactaggcccttctcctccctcaggcctgggcctcctggctcctcatctgaaggcctctgtcccttccagacaggagtgtcccctcccctcggacgggagcctcctccatctcagatgggcatctacgcttctctgacttgatcctcccctcttcagacctgggtcttctctacctcacgctggcagggcatcacctcatcggcatcaccctcagacaggggcctcctctcccaacagacagaggcctcctcctaccctctcagacagcggcatcctcccccctcagacagaggcctcctccctcctcagacaggggactcctccccccgagacagaggcctcctcctaccccctcagacaggggcatcctcccccctcagacagaggcctcctcccccctcagacaggtacctcctctctcctcagacagaggcctcctccctcctcagacggggacctcctcccccctcaaggcctcctccctcctcagacagggacctcctccctcctcagacggaggtttcctccctcctcagacaggggcctcctcccccctgagacagggacctcctgccccctcagacaggggcctcctcccccctcagacagcggcctcctccagccccacccccaccagacagggcatcctccctcctcagacaggagtctcctcccccatcagacggccccctccccctgtccccaccccgtgggacctactcctggccaggcccaggtggctggcccgcgcgtgctgccgccgcagctctgtgatgtagttgcagcagtccaggaagaccttcttgcacgcctcgcccagggagatgaaacgggtccggcgctggcacgagaacctcatggggttctcccgcatgccgtcctcgcagcacttgcgcagctccttggggtacttgccgactgcgggagcacgtgttcccccaggccacaccctcagccgggggccggcagcaggagggacgcgggacggaccccagggaggacttccccgccgccagggcctcccctcctccctctctggctcctgcacggccgggctggggtctcctggggtggggctcgggggcaggagtgggtaggaaaggctcccacctttgtccattcgcttctccgtgagctgcacggaacggcgtcggcgggcggctggctgcgggcactgaagttctgcagggcaggcggaccgagaagaagatggatgaggcacctactaggtgtcctcggttcacccctcacgatcgtgtgaggtgggggtgttcctgctcccatttgatggaagagcaaactgaggctcagaggggagggatttactaggtggtggtggaggcggggcttgaacccaggcccccggtttccagagctctgctcccagcatctgggaggtggaggtgctgtctgtccctgcaccggcccctggtggcgacctcacctgccctctgggcggtctgctggccactgctgctcgtgaaggtcagccctgcgtcggagaagacaccggcgtaatccttcccactgcccggggtgcagccgatgtctgccttctccaccacgtcccagatctgcggggggcataggggtggcgggacgcagggaggccaggctgacaattgggatcccccacatatgcacctgtgtatctcttcccaaatgaccccaccctgtcccactctcatctcccccattcctgcttctgcccttcctttctctttctctttccttccttccttctctctccttccttctctttttctttctctttctcactctctctctttctttctttcgagatggagtcttgctctgtcacccaggctggagtgcagtggtgtgatctccgctcactgtaacctccaactcccaggttcaggcaattttcctgcctcagcctcccgagtatctgggactacaggtgcatgccaccatgcccagctaatttttatatatttagtagagacgggatttcaccatgttggccaggctggtctcgaactcctgacctgaaatgattcgcctgtcttggcctcccaaagtgcttggcctcccaaagggattacaggagtgagccaccatgcccggccttctttttcttttctttctgtcttctttctttcccttccttcctctccctcccttcctccctccattcctcctttcctccttcctttgctccccctttccttccctccttccctccttccttccttccttctttccttccttcattcttcactccctccctcccttcctctttatctcctttctttttctttctctctgtttctctctctcttctttttttttcctcctttctttccattctttttttttttttttaagttgggattttccactgtctcccaggctggagtgcagtggtgcaggcatagctcactgcagcctcaaattcctgggctcaagcaatcctcgcacctctgcctcctgagcagatgggactacaggcatgcgccatcatgcccagctattttaaaattttttctgtagagatggggtcttgccatgttgcccaagctggtctgaactcctggcctcaagtgatcctcccaccttgacctcccaaagtgctgggattccagacgtgagccaccgcacctggcctccattccaaatcttatctccatttcccctctgattccatctgcattcccatcctcactcctgatcccaagccaaccccatctccatcttcgtccctactccggaaaccttccccactgaatgaccctgggtgtgctgccaccagcctctcagggccccagttgaaagtgtccaattctcagccgggcgcagtggctcacgcctgtaatcccaacactttgggaggtcgaggcgggtggatcacaaggccaagagatcgagaccatcctggccaacatggtgaaacccccgtcttcactaaaaatacaaaaattagctgggcgtggtgatgggcacctgtagtcccagctactagggaagctgaggcaggagaatcgcttgaacctgggaggcagaggttgcagtgagccgagattgtgccactgcactccagcctggtgacagagagagactctgtctcaaaaacaaacaaacaaacagaaaaaaaagtccaattctcaggaccatccccaattggaacccatgtccaacctcattcccatcttcagcttcaaccatccctgtgtctggtctgctccgatctctgctttcagcgcatgccccccactgcactgccctctccagtcccacccacctcccccagccccagctccgtgcctccgcctcttctcagcagccttgggtcactggcccttaccttactctgcgtcagtttgttcttcttattcagcacgaacacgcccttgtccacggccaccagtaccacccgggccccgtggtcaccctctatcttcagggtcatctgctgcccaggtacaggctgccggtcttctgactggccgctttttaccaccagctgtggggagggtggagacgccgaaagaagtcagccctgggagagaggagtgcctgggatggagtgggtgctgggctagagtggaaagacagaaaggttggggggagccgtggggctggggagggggagagagagggagagagagagaaagggagagagggagggagagagagggagagagggcgggagagagagagaaagggagagacagggagagagacggagagacagggagagagggagagagacggagagacagagagagggagagtgaggggggagagagggaaagggaaagagggagagaaagggagagggagagagagggaaagagagagggagagagagagggaaagagagaaggagagaaagagggagagagaaggagagagagggagagagagaaagggagagagagagggagagggaaagagagagggagagaaagagaggggagagagagggaaagggaaagagacagggagagagaaaaggagagagagagggagagagaaaaggagagagatggagagaaagagagatcgagagagggagagagagaaggaaagagaaataaagagagagggaaagagagatgtagagagagggaaagagagataaaaagagagacagttgagagacagagagggaggagagaaagggagaggaagagaagagagagaaaggagagagaaaaggagaaagggagagagagagagagaggagacagggagagagagagagagagaggagtagggagagggagagggggcgagcgagcccagggcacacttaccgagcccacgcaggagtccttgacgtccacccacacggagtcggccaccacctccctctggccgctggcaccgatcagcgtgtagtacgccaccaggcggaaggaagggatgaagtcggtggtgatggacaggggcagcaccaccaggtcctggccgggctctcgcacctggcgtcccgccttcaacagcctgcccttgttcatgatctggggggacaggctggcatcaggctggggagggtgagtggcagggaacgcagggagggatccgggatgggggaaggagtcccaggggtgcggaagaaacaaggaggaggcgggggctgaggtttccaggtggccacggaccaggtaggtgtagtagcggatcttggcctcgtgggcgcggtccattcgcaggaggaagttgacgttgagggtctccccgggtctgagctctgtacgtagcactgagagatgcaggtaattgttggagttgcccacggtgctgtagggcagagcctgcatggtcctggtagcctgctctgcctccgagagctcctgcttcttcgtgcgcacctgggtggggaaagagggatgcctgctggtcgccgcccgaggatacccacacccgaatccctgagacctgggaattggtggcctttcttaacaaaaggggctttgcagatgggattaagttagggatctggagatggaatcattatcctggattatgtaggtggagctaatgtaatcataagggtctttattaagcaggggcaggggagaaaggagagacagagacagagagaaagagagacactggaagatgctatgctgctgcctttaaaggtggaggaaggggccatgagccaggcctttagggtgccctggcgacactggaaaaagcaagggagcgaactttcccccagagccaggacttctgacctctcaaactatagacccataaatgtgtgttgctttagatcactaggctgtggccatttctcatggtagccaccggaaattcacgcacatgctgagcacagggaggggtaagtggggtgcgcagcctgggagctgcagagggactgggaggccatctgcaacctccgcagctgtcatgagacttgcttccctcccagtgaggggcaacagagccacgtgcacagaagccaggagaactgagaccacctcacaacaatgggcctgtcccaaacactacacaaccctccttgtgagattcaggctccttcccccatgggagtggaaagactgtgcgtggatggagcgcctctccgtgtaagtggaaggagcagggcatgcaagaggaagattcctgtttcctcaaactgcggacccctccatgcagacggcaggaccccactgtgcaggacagaacccctctaggcaaatgagaatgtctatgcaaatggcaggaccccactgtgcaggacagaacccctctatgcagatgagagtatctctatgcaaatggcaggacccctctgcgcaggagagaacctctctatgcagatgagaatatctgtatgcaaatgacaggaccccactgtgcaaacaccagaacccctgtaccgtcttcccagtgatggggttccgaggctgggcccagacgcaccgtgatgctcaagggcttctggctggggtgtgtgttgatgctgagtttggccacgccatctccctgggttagagactgcacagtgtcctcgccctggactgccacggggactcggtaggctggagagccatcagggttcgtcacgaacacctgtgatgtggggtgcaggtgggggaagttcaggcaggctcagggctgtggccggtgtccccgaagggaggagtgggaccccttcccgccccgggtctcaccatgaggtcaaagggcattcctggtttgaagtacttgggtgtcttggtgaagtggatctggtagggagaggtcacgatggggatcccgctgcgctctgcctgcaccatgtcactgcctgaggggaccagctgtgagtgtaggcttctgggccacccctcaggattagacctcctccctcagaatggaccccaacttcagactagacctcctccctcagagtagagtccactttcatactgggcctgtgccccccatcagactggactccacctttatactggccttgcctcctccatcagactggcacagacttcatactgggcctgtgacccccatcagaccggaccccacctttatactggccctgcctcccccatcagactggacccatctttatactggccctgcctccctcatcagactggacacagacttcatactgggcctgtgcccccatcagcccggaccccacctttatactggccctgcctccccccatcaggctggaatccatcttcatactcggcctcccctctcagactgggcctaccccatcagactgaaccccactttcactctgagcctccctccttagactaggctttctcttctgacctggtctcccctctcagaccggcccacttggtggtcctgagcctggccttcagactgggcctcacctgagtgcaagatgacggtggcagacacgtacaaagacttccccaccaggtcttctgctcgggggttctgcaccccgtccagcagtaccttccggctcagcacaacctcccccgagccatcctcaatctgagaagggagaggagggctcagagaggggagcgggctcagaggtggcggggactggggcagggatcaaagcggcctccgtctatggtaccggaatgcgcttgagggattcaggcagggaaatcctctgttcgccatcctggatcccgaagatgacaaaggcagttccctccactttcttcccgtagaggaacctacgggacagacaaggagggcttcaggtccatccctcctggagaatgggatctcccccagcttctcctgcctgtgctgaagactggagcccccaacccactgctggcctctcacctggccccacctccagcccctcacctggccccacccccagccccccaccttgccccactcccaccccccacatggtcccacctccagcccctcacctggccccacccccagccccccaccttccccactcccagcccccacctgactccaccccccagccccccacctggtcccacccccagcccctcaccttgccccacccccagccccccaccttccccacccccagccccccacctgactccacccccagccccccacctggtcccatctccagccccccacctgactccacccccagtcccccacctggtcttcacctggtccctcacctggctcttacctggccccacccccagtccctcacctggcggtgatggtgacctccaggcccttctcgttatagatgtagtagaatttctctgtaggctccactatgacctcgaaactgggcagcactgggggagagatggcgttggtggggccggcgctgggccaggcgttctgggcactgactccccccagcccctcctcctcttaccgtactccttcacctcaaactcagtggagaagacctgctgtggtgagttttcatagtaggctcggatcttccactggcccatgctgtgaggagggcggatgagtggtctctcaggcctcggagcccccctgctccctctccggggataggggagccctgagccccctcctcaagaacctgacatacttgacgagttccggaatgtcccaagacaagggcaagacgccaagctggttctgagaagacaaggagtcctgcttgaccgggatgccttccgggttctgtgggaggcaggagggaaggatagaggataaagtggctcttcggaggctgggcttagcctctcagctctccccgacctgtgtctggacattctctgtgcacagtgtctactgtggttaagaacagggacccaggtgggcgcagcggctcacgcctgtcatcccagcactctgggaggctgaggcgggcagatcacctgaggtcaggagttcaagaccagcctggccaacgtgatgaaaccctgtctctactaaaaatacaaaaattagccaggcatggtggtaggcacccgtaatcccagctactcaggaggctgaggcgggagaatcgcttgaacccgggaggcggagattgcagagagccaagatcactccactgcactccagcctgggagacagagtgagagtctgtctcgaaaaaaagaacaaggaccggagtcagtcaaccttaggtttcaatctctactgtgccacttacaagctgtgtgaccctgggcaagttacctaacctctctgtgctcaatgtgcaaatcttgaaacaggagattataatggcacctactgtgttggcttgggacatagttcatatgagtaggggctcattttttcagtgtctctctgaatactaataactagtagtgtcatttcatttgctgccaacatttaaacatcatgagacatcattgcaccactgcactccagtctgggtgaaagagcgagaccccatctcaaaaaataatgtattagggcgagcgcaatggctcaagcctgtaatcccagcactttgagaggcagaagtgggaagattgctcaaggtcaagggttcaagaccagcctgggaaatgtagggagactccatctctacaaaaattttttaaaattagctggatgtggtggcgcacgtctgtggtcccagctacccaggaggctgagacaggaggacagcttgggcccaggaggtcaatgctgcagtgagctgtgattgtgccactgcactctagcctgggcaacagaatgagaccctgtctcaaaaataataataatgaatgaatgaatgaataaataagtttaaaagaaattgtacagaggtaacagggatcaggcaagtggcatatctgaaggccgtgagctggctttaggaattaaaacatataaaaatctgttttttttttgttttttttgtttttttttttgagacggagtcttgctctgtcgcccaggctggagtgtaatggcgagatctcggctcactgcaggctccgcctcccgggttcacaccattctcctgcctcagcctctcgagtagctgggactacaggtgcccgccaccacgcccagctaattttttttttgtacttttaataaagacggggtttcaccgtgttagccaggatggtctcgatctcctgacctcgtgatctgcccgcctccacctcccaaagtgctgggattataggagtgagccactgcacctggccaaaaatctgtttttctagcttctgttggaaacaaggaaatttctgtggatagtgtactctggttagcaggagacatctaattggagctgggcaactgttgtgcctttacaagagatgtgtggtctctgttccccacagaccacatcaatccctaaatctagataatttttacattttttttgtagagatgtagtctccctagctttcccaggctggtcttgaactcttggcctcgagcagtcttcccacctctgcctcccgaaatgttggaattacaggcttgagccattgcatttgccccaattattttttgagacagggtctcactctgccacccaggctggagtgcagtggtgcgatcacggctcactgcagcctggaattcctgggctcaagtgatcctcctgcctcagcctcctggggtagctgcaaccacaagcaagcaccaccacacacagctgtttttttgtttgtttttaacttttcttttttgtagagacagggtctggctgtgttgcccaggctggtcttggactcttgggctcaagcgatcctcccgccttggcctcccaaacagctgggattacaagtgtgagccactgcacctagccttgtatgatttcaacacatcctcatgataattctatgagaacaccctccttccccttctctcctcccatccttctcgcttcttccagtaagttttttattaaacccaactatataccagcattgtgctgagttcaggtgacaaaaccctcaacaaacataacaattccttcctggagggatttaggttcaatagagggcgaggcgatgggagaagcaattatcaaatgaataaatctcatttgcaggacatggcaggaaggaggagtgtgtgtagcggggaggggggacgctcagggtgggtatttgcgactttataggttactcagagagacctcattgtaaaattgagacattggtgacatttgagcaaagacttaaaggaggagagagaacaagctgtgtggatatttggaagaagagggttttcttgagaagagggcacagcccgtgccaaggcgccaaggcaggactgcacctgggtgttggaggaacagggaggatggcccgtgtggctccagaagagtgaacgagggggagagagggaggaggggagggcagggaagggacagggcaaggtgtgcagggccttgtggactgcagggaggacttgggctttgacgcataggaaggtgggagccatggagggctgtaggcagagcagggatgggccctgactcaggtgctcacaggcgtcctctggctgccgtcggtagaatagatgacatacaattatccgtcatgatcccgatattcagataaggtaactgaggctcagggaggtgaagtgatcaggggtttaactgaaagcagaatccacggacacctgcactgctccctggggtctccctggatctccaccttgtctctcagcctgtgtgtgtgtgtgtgtgtgtgtgcgcgccatatggtgtattgtgtggttgtgtgttgggttgtgtgttgtgtgtgctatgtttgtgtgcactgtgttgtgtggtcgtgtatgttgtgtggttgtgtgttgtgtggttgtgtatgttgtgtgtgtgttgtgttttgtgtgtgttgtgtgtgttgtgtgttgtgtgtgtttgtgtgtgttgtgtgatagtgttgtgtggttgtgtgttgtgtgtggtgtggttatgtatgttgtgttgtgttgtgtgtgttttgtgtgtattgcgtggttgtgtatgttgtgtattgtgttgtgtgtgttgtgtgttgtgtgtgtggtcatgcacgttgtgctgtgtgtattgtgttgtgtgttgtgttgtgtgtgttgtgtggtcgtgtatgttgtgtgtttgtgtgtgttgcattgtgtgtgtgcattgtgtgtgcacatgtgtctgcatatctctttgcctctgtgtgtgtattgtgtgctgtgtgtgtgcatgttgtgtgctgtatgtgtgtgtgttgtgtgggtgtgtgtctgcatatctctttgcctctgtgtctctgccactgcaccccttccggtgtgtctttctctgtctctctcgatctctttgcctctcctaagcctgtgcccctgcttcccctggggccccctctggctggcacctcaatgttgaccatgaccgtccggcccacgggtagcagcttgtggttgacggtgaagatccgatagagaactggggagagacaaagaggcctcgtgagaccctagcccgcccacgccggtgccccgccctctccagccgcccccagcctcacctgtggagccaggggtgtagatggtcttgtctgtctggatgaagaggtacccgctctgcaggctgaccagcaccaccttctccaccacttgggtcccgaaggtggcctgcacggtcacgaacttgttgcgccccttttctgacttgaactccctgttggctgggatctaggcgtgggcagggcattgtcaggggtctgttccaaggccccatgcccacggtccagcttccggatcttgggctgggtccctccttgcctgcccattattcttggtcttccgaggtggccgttttggggagggaggggcatgtgaaggaggtgcgaggggagaggggggaccagggagggaactcaaaaagaagagctcacaaggaggagagagcttataggaggaggggctcagaaggggcggggactcagaaagggaaggggctgacatgggaggggctcagaaagggggagggactcaggtgagggaacttagaaagtgatggagactaagaggggaggagttcagaagaggagacttcgagggggaggggcttggaaaaggaattcagtgggagggacttagagggggaggagactcagaaggggtggagtctcagagaaggggaggaacctcagaaggggtggggtctcagggaagggagggactcagaaggggaggagtctcagaaggggtggggtctcagggaaggtcagggcttagaaggggaggagattcagaaggggtgggggggggtctcagaaaagggaggggcttataaggggaggagactcagaaggggtggagtctcagagaagggaggggcttagaaggagaggcgactccgaaggggtggagtctcagggaagggcagggcttagaaagggagaagacagaaggggaggggctcaggaggagggggggagtgggcgtggctgtgggtgtcagccgggtcctgcgccagtctgcactcaccgtgaaggtgacgttgcccatgtggttggtggcaggggtcagcacagtcttctcactggacagcactagttttttgcctgggaagtcgtggacagtaacagtgactggaacatccccttgcgcgtcgtgggcctccagcaccatggtctcctcgctctccagccgcaagatgttgggggtgatgatagagtacctgtcggagtggggcacgggagtgggcttgtcattccacggatgtgagacgccagtcctcactggagtcagcgcctggcaggctgtgtgccccagcctctggtcctggagaggatccagtgactgccggcgcacttgccaatgccattatcttctctgggcactgccaccgtctcaaccacatgggcaggacagcagccaccatgactcccactctcagccagctgggcctggcctttgaaagcctgggcaacgagggggccacacatcccaccaaaccctgaaccttccaaccagcgtcagcaactcctccaagtctctggacttccagacccacaatcgcctaaacccacacatgccccaaaccctaaacctctacctctctaaacactccaaatatgtaaacactcaaactcccggacaccctcaactctacctacccaaacccacatacgccaaaacctctaaacctcaaatcttagagcaccccaaacccagcctaaacctccaacaccccagtcctaataaatacaatcaattccaaatgccccaactatacatgaacccgaagtagccaatctttaaacccacactgaaaattgcaagtccccaagctgcaaactcccaaatcttgtaaagtccaaacctccgagtctccaaacacccccaaccgcaccatcaatgaacaccacatacaccctaaaccaacagatgacctcaattctagaaacatcccaaactccaattccaccatacctggattccacaaacacccaacccataaacacccaaactctcaggcagcccaaatgtatataaactccaattccacgatacctggattccacaaacacccaaccacaaacacccaaactcacaggcagcccaaatgtatataaactccaattccatgatacctggattccacaaacacccaaccacaaacacccaaactcacaggcagcccaaatatatataatcattcccaacctgctaacccctgaatccacaaacacccaaatgcaccctgaattctacagggacctggacccccaaatgtctgcttccaccccagaaccagccctgtttgtgggtagagtcataaccactcacatgggactccccagagccagggggaggtgggttagtagcaggagcagcaggctgggacctgaggtgggtcccatggtgctgggacagtgcagggtcagagggacagagggacagagggagaggatggggaggagtgagcagcgcctgctggagctggctttttatctggctcctgcctttcccccactcagcccccccttctccccatggcctctccccttttggggctgccccagatttctcaataccatttcctaagcttttcagtccctggggccaacatgtccatggggtgagtaacctgagggcatgttccccagcagcatgaatgcagctgcaccctgccctggactctcccagggtcagggccacctggtgaacacagacctttctctgttggacccactttgtagtggaagaacactaaggtctggagaaccccccaccgcagatgtcttggacctcatccccagttcacttttggccatgcgtttatcagtcgaacacttcctaggaatctctctgtaggctgggagtcagagccccacttccagaggcttccatgctgagggaggggaagtagaatgggggagggacagagcccagcacagaaactcccagtttcatgaaatgttttctagctcatgtgcagggcagggaaaaaaaagaagaagaagaaatgttttccccagtgaaatagaactctgcttcttggagggtcagggaaaacttcctgtaggaggggacatttcagatgggctttgaggtatgtgcaggagttcactatccaagtgagtttattttccaaggaggctcccctcacttacccttgtcaggatgcctgagtgactttggtggtgaaaaaagtcatcactgaggaaagtcctcatttctagagcttttgtacctgtctaatgtcaatatcctcttaggatattaaattgtattgtttgtgtgtgtgtgtgtgtctgtgtgtgtgtctgtgtgtataatatattcatattgatcaacatctaaaaggtacaaatgtgtatagcagtaaaggtggtcttcctcccatccctgttgacagcatattctttttgtgttttcctttaaaaaaatttttttttcattctgtcactcaggctaaattgcagtggtgcaatcacagctcactgcagcctcaacctcctggggtcaagtgatcatcctggctcaaccacccaagtagccgggactacgggtggccgccaccatgcccggataatttttttatttttgtggagatgggggtcccacgatgttgcccagtccagtcttgaactcctgggctcaagtgatcctcccgcagcagcctcacaaagtgctggtgtgaactactgtgccctgtggacagcacatagcacatactattcttcctggtctcttcagttaaatcttgggtttcgttttgtttcgttttttcatgaacaatatacctcagaggctatttcacctcagtgagcaaagaactgcctcattcttacaggttacaggcctcttgttatattgtgagaaagtaaccagcctcctactttttgggggatattttgtttgtttgagtgttttttttttagagtcttgccctgtcacccaggctggagggcagtggcgctatctcagctcactgcaccctccacctcctgggttcaaacaattctcctgcctcagcctccggaatggctgaaattataggtgagcaccaccacgtctggcaatttttgtatttttagtggacaaggggtttcaccatgttggccaggctggtcttgaactcctgacttcaagtgacccacctaccttggcctcccaaagtgttggaattacaggcgtgagccgctgtgtccagccaccagcctcttcttgatggagagactgacatctgtggcttcacaccaggctctctgcagtgaataagcttgaacctgcgttattttctagctctgaaactagctgtgatctttgggtaagctactgattaccgccctgagcctcagtttgttcatggaaaaggaaacccttaccacctgcttcatagagttgtcgttgcaatgaaaggaaatatgttgggtcaatctctgaatgcactggtaatcttgctagatattgccaaattcccctgcacagaagttgtattgatttacacacttatgagccctgcatgaaatgaattgtcagtttcttccacagcctcatcacaagggcatgttgatgaacttgaagatttttgccagccttatgggtgaaaactggtaccctggtgtcattttttttgttttgttttgtttttttaaatggagtcttgtgctgtcacccagggtggagtgcagtggcgccatctcagctcactgcaacctctgcctcctgggttcaagtgattctcctgcctcagcctcccaaagagctgggatcacaggcatgcgccactacacctggctaattttttttttcttttattttttattttttgtatttttagtagagaaagggtttcgccatgttggccaggctggtctcaaactcctgacctcaggtgatccgcccacctcggcctcccagagtgctgggattatagaagtgagccaccacaccccggcagccggtgtcattttaactggcattcctctgacgttctgcagcattgctgcccaggcatacgaggtggatggtgagggcaggagaagggtctgtgggtggggcccccttatccctggagaggcggtttctgaaaccccactgaaggggttaatggggagttttctctgatttcctgtaaaccacattcttttccgtgccaggggtagggggaggcgtggagcatgagaacaaacctggcgtctgtctgcactgattgcgacacactctttggaagaggaggaggaggaggagagagaatgaaaatacctgcttgctctccagaattggggttcagcttttgaaactgcatccccttgccaggcgcagtggctcacgtctgtaatcccagcactttgggaggccgaggcaggcagatcacttgaggccaggagttggagaccagcctggccaacatggtgaaaccccgtctttactgaaagtacaaaaattagccaggcgtggtggtgggtgcctgtaatcccagctactcaggaggctgaggcaggagaatcgcttgaagccgggaggcagaggttgcagtgagctgagattgcaccactgcactccagcctgggtgacagagagagaccctgttgccaaaaaaaaaaaaaaaaattaaaaaaaggaaagaaactggatctcccaattgccccattccatcttctatcccccactttctcctcaagccaccccatttcctggtttcattctagactcaagcattcggcactgtggtttgacaaccttgagaaggaattcctgtctggcctctgtctagcggcaagcctgggttcctcttttctctgagcctcggttaatccaactaaacaatgcgactgaagatagttctggttgttgtgacaattaaagaaaccaggatgcctagaagccaccaggctcagaggggccaggtgtggtggctcacgcctgtcatcccagcactttgggaggctgaggctgggggatcgctggaggtcgggggttcgagaccagcctggctaacatggtgaaaccctgtttctactaaaaaatacaaaaattagctggctaggcatggtggctcacacctgtcatcccagcactttggaaggccgagatgggtggatcacctgaggtcaggagttcaagaccagcctggccaacatggtgaaaccccatctctactaaaaatacaaaaattaactaggattggtggcgggcacctgtaatcccagctactggggaggccgaggcaggagaattacttgaacctgggaggcggaggttgcagtgagccaagatcgtgccactgcactctagcctgggcgacaagagcgagactctgtctcaaaacaaaacaaaacaaacaacaacaacaaagaattagctgagcatggtggcaggtgcctataatcccagctactcgggaggctgaagcaggagaatcacttgaacctggaaagggtctggccctaccctgacctccaagaagtgaccagaggggaggggcaggatgagaagtgagggggttggaggctggagcagatggtagcctactgggagggaaggagggagggagatgagaccgggaattcttcagaacctcgtgacttttttctgggagatgtgcattggtgtccagaggtttgggagggggatagtgcacaaggatgagccagcaggggagggagagaaggaggtctgggtgtgtgttggggtactttccattttgaggcccacccagcccagcattcccggaatcaaggagggagagtgtggccaaccgggctgaccattcgtgggttatctggaagctacatatactgaaaaagtagttgttatttatctgaaattcaaatgtaactgagcgtcctgtattctgtttggcaatcctagctggggtgcaaggggaaaatgagaaggggccagggtgcggtggctcgtgcttgtaatcccagcactttcgggaggccgaggtgagagcattgtttgagtccaggagttcgagaccagcctgagaaatacagtgagacttcgtctctacaattgaaaaaaaaaaaaaaattagcagggcatggtggcgtgcctgcagtcccagctcctcgggaggctgaggcaggaggagttagaggctgcactgagctatgactgcaccactgccccccagcctgaatgacagagcaagacaggaaaaagaaagaaaataagaggaaggaagtgggaatgatttctgggtgggggacccagatgcccccggctcacacctgcctgagttcactcactgtcccctatatcccatccctccccttccccaacaaaggggcagccaggcctgggagcagctgggaaacccctatcccatcgtctaattccaggctgaggtggctgctttcctagaatttttctccagaacccacagcaaggccatccccttcttccaccctattactgattaattcaagttaaccttgacctgactgactgaatcaatctatctgcctggcaacaatggctctttccctcctctccctctggtacactcagcagaaacaagctggggccctatagactcccgccctgggaaaatggagagcagtgggttttgattccagctctgcagggcccctgggaaggtccaacccctcctcccagcctcggttcctaatctatcaactggagatgcacagcctacagcctcctttctagtcttggagtggaagtcccaagtggcacccaggaaacaatccttaacccagcgccctgcgcatactgagcgctcagtacacttgaactgtactttttgtttttgttttttgagacagagtctcgctgttgtcggcctgggctggagtgcaatggcacgatcttggctcactgcaacctccgctgcccggttccagcaattctcctgcctcagcctcccaagtagctgagattacaggcgcccgccaccgcacctggctaattcttatatttttagtagagacagggtttcaccatgttggccaggctgatctcgaactcctgatgaactgtatttttatttttgcaaatacccgtgtcttctaccccagccttgcttgggtgacggccccaccaggcttccaggctggactccttccttcctctcattcccagaattcacctgctggccaagcccctgcctggaatctcccagcttatcctccctctccacacctgtgatctctgccctcacctctgccccagcctcctccttaccagcccatttactctgcagcagctggggacgctttacttttatttatttaatttatttttctaaattttatttatttatttatttgtgagacggagtcttgctctgtcgcccaggctggagtgcaatggtgcgatcttggctcactgcaaactccgcctcctgagttcaaacaattctcctgcctcagcctcccaagtagctgggatgacaggcaccagccaccacgcccggctaattttttgtatttttagtagagacggggtttcaccatgttggccaggctggtctcgaactcctgacctcaaatgatctgcccatctgggccttccaaagtgctgggattacaggcgtgagccaccgcgcccagccttattttactcttttaaaagcagggtatggccctgtcgcccaggctggagtgcagtggtgccatcatagcccactctggcctcaaactactgggctcaagcaatcctcccacctcagcctcctgagtagctgggactacaaggtgcatgtcaccatgcctggcttggggactccttcctttctaaaatccacctttgggccaggcgtggtggctcatgcctataatcccagcactttgggaggccgagatgggtggatcacttgtggccaggattttgagaccagcctggccaacagggtgaaaccccgtctctactaaaaatacaaaattagccgggcgtggtggcacatgcctgtaatcccagctactcgggaggctgaggtgggagaatcacttgaacccaggaggtggaggttgcagtgagccgagatcgcactattgcacttcagcctgggcgacagggcgagactgtctcagacaacaacaacaacaacaaataccctacctttgtattcctttgaccgatcatgagcgcactgacgctcacaaacgcctatgagatgcgggtggcagcaacttatctatttcacgtattttaacccttgtttatgccacatgccataggttctatcattgccccattttacagatgaagaaacagaggctttggctgcttgcccgagatcctgtggctggtaagtgccggaatctgaactcagagagctgggccctatagagtacgtgcccttaaactgcatgagttcttaactgctgcagcaaaagatgactgcaaactcggtgcgttaaaacaacatgtttcttatcttacagttctggaggtcagacgtctaaaatcaaggtgtcaacaggactgtgttcccttctggaggaaacagatgaacccatttcctcgcctttttcagtgtctaggagccgcctgcattccttggctcgtggcccctttcttggaatcactgcagtctctgcctttgtcactgagtctccttaactctgaccctcccacctccctcttataaagacccctgtgacgatattgggcatatccagataatccaagataatctcccccattttaagagccttaatcccatgcacaaagtcccttttgccgtgtgacagaacatatcatatccacaggtcttgaggattcagacgtgcacaccttttttttttttttttttttttgagacaggtctctcgctctgtcaccaaggctggagtacagtggtgcaatctcagcttactacaacctccacctcctgggttcaagtgattctcctgcctcagcctcccgagtagctggaattacaggtgcccaccaccatgcccagctaattttttatttttagtagagatggggtttcgccatgttggccaggctggtcttgaactcctgacaagtgatccgtctgcctcggtctcccaaagtgctgggatgacaggtgtgagccaccacacaggctggacgtgcccatctttgaggggaccatgactcagccgactgcagcatgcacatgcagtctctctggccatgctcctccctgctttaaattcctccatggctcctgtggacccctggatgaagccccatgtgcctgcctgtctttaggcctctgccagcttctctcgccctcctcctgccccctccagcctcgcgggccatcccagccttccccgccgtgttcatgtaacttccccagtctgcaatgcctcccacttccttctttgtctgaccaggctatttattcatctgggccccagctatatttgtttctgcttacaggaagccttcaccccagccctgttccctgccgctgtcccatgcttgtgtctccagcgaggaaggcttctccgagctccaaaaggcattctggatgctctagttgaagggcaggtgggtggggggtggagacccatcttgggaacctgcccttaagtgtgcacacaagcagatctccaattcctcagtcgcccctcaagattcagggctggttccctagaaatcaggtcgaggctgtgcagctgggtgctgtgcctgctattgtatgtgatactcaacaaacttaggaggccccatgttatatgcaaggaaacagagagagtaagccagtgatccagggtcacacagcaaatggcaacaggctgagagatttggtcccagggagtctagctatggagcagcaatgcatatagtcagtgtctggctttgagccgggagtctcccactcactcatgagctgtgtgacctcaaggaggtttcttaccctctctgtgcctcacaggctttttaacaaattaaaatccacagaagccttaatagacagcgtggcgtagcaatcactctgtgttacctcgtattattttttcttttcttgagatggggtctcgcttgttgccctggctggtctttaactcctgggcttgagtgatactcctgcactgacctccgagtagctggaactactacaggcacttgtcactgtgcccggttagcttctattattattatttgttttgagatggagtcttgctctgttgcccaggctggaatgcaatggtgcaatctctgctcactgcaacctctgcctccctggctcaagcgattctcccatttcagcctcctgagtagctgccattacaggcacctgccaccacacccggcaaatttttgtatttttagtagagacggggtttcaccatgttgaccaggctggtctcgacctcctgacctcaaacgatccgtccgccttggccccccaaagtgctgggattacaggcgtgagccaccacgcccagcctattctttcttttcctctgtagcctgagccacttgggggccttcaaatccccgttctcccctcgcccccagctttcatgcccgcggttccctcatctgggcatgagctcttccgccatgtttctactgacctttcctgacccccaaggccgggtcagagccctgtgcagttcccgtcacggcgctgatggcccagtgatggtactgccaggtgacatgtccctctgcctgacccccactctgggcactgggagcccctttagggctgggaccaggtgggtctttgtgaccgctccgtcccagcgcctggctttgggccctgcatgcagcggttactgaatgaatatttattgaatatacaaagacacggaccctgtgcccgcgcccccgccacacacagcgaaaacaggtttctacattgtaaacacaacctccgtgtagaccccaacccccaaaaaggcaagacaacggcgtagccaaacagattggtcattattgtacacatagctggaagggaggggtggtcccggggtaaggacagggctgcccaatatttggggggaggaagggactcttcttccaaatgggcttgtccgggaaccggggtcccggggagctgggcgcctggtccacatggaccccctccacctccccacatacgctgtggaagaagggcaggagtgagaaatgctgggggaggacgaccctttggtctgagatgtggaggtgatcataacagttcccgcccgctggctgttttgttgactttggagaggccttcccggaacccagagtccgtcattctgggggcagacagcgaggaggcgtctagcgttgcagggcagcaggccccacccactctacccggaaccactcaggccccgccccactccccccaaccacagcagccctggccttgcccactctaccccagactcacccaggctgcacccacctcgctcccacagcagcgcaggccctacccttctactccaaccacctaggccccgcccccagcagccctggccccacccactctacccgtaaccactcaggccccgcccaccttactgccatagcagcccaggccccacccgttctacccgaactacctaggccccgcccacccccgcccccagagcggccctgggtgtctccctagcggccctaaccccacccctagctcagcctggccttaggtactccacagctgtccggtccccacctgcacagctgccctggctgccccccatctcccctccatcccttctcaacagcaggctctgccctaacactgcccccagggctgctacagtccctcccccctgcccaccctgcccgtagagctgcccaccccctactccacccccagagccgccggccctgcccatggtgcccagctcacacttgctccatctgaacatcctcctcgtcctcctggggcagctgcaggtacgggttgtttcctgtgggctggaacttgtagcccgtgagcacgaagaaggccagggtggagccctccaccaagagctgggggacggggcggagtgggggcgtcaggcgcacccccacccccaccgtggccgccctcccgtcccacctgggcctcgggctcacctggtacagccactgccactgaaagggcacagccacctgcagcaggatggcgatgatgcgggtgaagtagacgtagcagatgacctgcaggggcgcgagcaggcgtggggccaggactgtaggggcacgggcaggcatggggctagactgcaggactgcgggctggggagcctggatgggggcctcgggatggggcagcagctgaggggctggggtgggcgtgcagcaggccggtaatccccccaaacccgctgtgagtgaggcgggctcctaccatgacatagtaatgccggaacagcttcagcttggccaggttcactgccactgagggtgggcacagagagggcggtcaggggagactgagggtgggagggaggggagggggctgggggctgggagaggtgacaaacagaacatctgagggagtgtccaggagcagcaagtctcgaggggacattaggtggggcagaaaggcggaagggggagatcagagaggagggaagggccacccaacagggcagagaggccagataaaggcattcgggggaaagagaggccagactggggcatccagggaggcagaggcctgggggctgggcagagaggccaggaggggcatccaaggggcagaaagaagggcccggaggaggaatggggccatgagcagagggcctgcaggcgcagggcctcacccttcccgtctgtgccagacgcatcctggagatgccggatggacctgggacaagtggaggacacagggtacggtcagcgcggacatcgcccatgtgcacagggcagagcctcagcccgggggcagggtcctcaccagactacggggaacaggatggcaccacagcagatgaggtccaccaggaacaaaatctccttccacagcacgtagtcgctggcgccttcctcgcgggactcgatgatgatgtaggccacgttggccaggacctgcgcaggcggcgggggtgggtgggcactgcctggcacgctcccctttgcccccactgccctgtgcagccctccccgccctgctccggaggctgctccatccgcacctgcatggggatcacgatcccaaagaccttcttctccttatccgacaggacgtacttgatgaaggcccagcctgagccaatcagggcgatggtgatgaagaggagggcgcccttcagcctgaaggagcaggggagggcgtgatgatgaggtggggggccaaccctcccctgcctgcctccccccagctgcccagcagagtgggggacactcacaggtgtgcgatgtagtacatgacggcaaggccttcgatggggtggccctggctgttgatgaagtagtagttgatctgggggtggatggacagacggacagtgaggcgcacagaggggtgggaggctgatggtggtggtgggggattaggaacacggaccgtcaccatcagatgggtggtcagaaagttgaataatgaggacggtgggtgggactcaaaactggtaatcggggctgaaaaaatggagggaacagtcacagctgaaggggtgaatagttggacaatcagagacggacagtcacagctgaaccaagggacagtggtggacagagctgccccgcaggactggtggacagaggggatgggtgactggccacactggtaaaatgggtggacacgtggatagctggcggatggccctcccacaggcccagggtctgcagagatttgggggatggcccgggtgggcctttcagcccaccccccgctgctccccggtccaaggctctcacgctgtggaagaggagagagatgctcttggtgaaggccaaggccgccatgagccagtggatcttgaagacgctgtacctggtgggagggtcagggagagatgggggtgcggggcatcagcagagcatagggatgggggtctggtgaagggacgtgggggaccctcaggggcaggggcattacgtgttcctgcagaggatggacacccagaagatgccagcggccaggaagcaggcggacatgaccatgtagagcttgaaaaggggcatctccgctgccgacaggaagccatcggggttcttctcccggatcatcacctgcggagggggcagtggtgggcggcggcaggggcacagcccgaccgctggcctgggagagcagcgagtgggggtctccagctctctcactttctactgggccactcatccactctgagcctcagttggccccgtctctcaaatgggtataacagctcctacttcgcacccgggagggctgggaaaagctaagcggggtgaggcactctgggcccgcagtggcctgcagggggcgctccctggccctgctgccctccactccgctcaccgtgatgtcgaatggatgctcctttcctggcactgaattgttgcagttgtggaagttcaggctgtactggccttcttccgcctgagagccgatcaccacgtggaactgggcgggcggggagagaggagggctcagcctgggggacccgtggtctggggcgacaatcagcttgggggtcccatggtctggggcgatggtagggctgcaggagggctcagcttgggggtcccgtgctctggggtgacggaagggccgcaggcgctgcaaacactcacactgaagttgtaggagttgttgaggtggctcaggcccaacaccaggtccttgtccttcccactaggaccctgaagggacagagcccctccatcagctggttctgggtccccgcagggccctggggtgtgcatcttccctcctgccccgcctccccgaaacctgaatcactgcgggtgttgacttgggcttgctggctgcagaggtccctcctgtaagagaccgggcagtgattttaagagatggatggatggatagaggggcagtgggaaaacggcatggggagtgcaaagggcagacctgcccatccacccccgtctgcacagccagcctgactcaccgccatccaccttgcgggggactgtggcctgtggcttcgggagccctggtttggagggtgcttccgggaggagcccgggaaagataaacaacgtcttctgctctccatacttccgcacctggaccctggggtgagggtggggtggggcatgaggctggggggctgaacttggctcaggcaccggcaaaggactcagtggccccttggaccctctgcgtgtcctccctgaggggcggggtccagtcgagtcagttatcactgagtttcagcctttggttcccaccggtcaaggaggctgccgccttcctgtgctgcctgcatccgcagttattcgtcatttcccatgacatcaatctactctttttctcttttctttagagacagggtcttgctctgtcgcccaagctggagcgctgtagtgcaatcacagctcactgcagcctcaaattcctgggatcaggcaatcctcccacctcagccacaggagcagatggaaccacaggcgcacaccatcatgcttggctaatttttaaattttctagagacaggggtctccctacgttgcccaggctggtcttgaactcctggcttcaagtgatcctcctggctcagccagtctcccaaagcactggaattaatggcatgagccaccatggccagccctacattattattattattattattattattattattattattattattattttgagacaggctcttgatctgtcgtccaggctggagtgcagcagtgcaaacttggttcactgcaacctccacctccccagctcaggagatcctctcacctcagcttccagagtagctgggactacaggcgtgcaccaccatgcctggctaattcctgtacattttttggttttttagtaaagacaaggttttgccatgttgcccaggctggtctacaattcctgggcccaagcaatccttttgcctcggcctcccaaatactgggattacaggcgtaagccactgcctggccctaagtatattatttaaaaagaaaacattttatctacagaaaagcaacatggttttgtcagaccctggccccagaatcccagttcctgggactcagttttcttgtctgaagagcggagatgatcacaggataaggaatgggtgagttagtgtattaaagctccgggacaccggaagcactcaacatgtgcgaacaattgttattcattctcacaacaaccctctgtatccgggtcttctgccctgagacaccaacacccgcggagtccctctctccttccttccaacaatcagaagacttgaaggcaaaactaaaaagtaagtggctttctctctctgcttctcatcccacctgatcagcccaggtgcgtgtgggcatcacaccagggaaacgcagacgaaggatctgagcgagcccccggtccccaactcactgcagatccttggtgttgatgaggaacaggaccaggaaactgctactgtttttctggagagggcagtcctggaaatcccgggtctggggggtgggcaggagggagtgagtcttggttactcctctcctggtccagctccaccctgtctccctccctgtccacccacgggatcttcctgctcctgcctctgacaaagaacaggggcccttgggttacagatgcagaggacagaccctaccccctccctccagccccttctcccgtcttccccatgccctccactcactgaataggagcgaactctgccagaccgaacccggctgagactgaaccccacctggtgggtggaaaaaaaaaggggagggtgtgagggacagtagagacctcccagctatccctttcagtagcaatagaaacctaacctcacatttactgaacacctaacatgtgctagatcccacacgctctttttcttttttagagttggggtggtgggtggacctcattctgtttctcaagctggaatacagtggcaggatcatagctcactacagcctcgaactcccaggttcaaacgatcctctcacctcggcctcccgactggctgggactacaggcacacctcaccacgcccggctaattttaaaaactttttgtagagacggggttctcactatgttgcccaggctggtcttgaactcctggcctcaggcaatcctcccaccttggcctcccaaagtgctaggactacaaagcctgagccaccgcgccccgcctgtcccccaagtcttaagaaaagtgcctagcacatcctgtgtaagacatcattactcccaggtacagatgacgaaacaggctcagagagatgacgggacttgtacaagatcacatgggtagcggcagagctgggaacccagaaccgggggattgcaccgtgctctcctccagcaaactcctcaaggtccctcaccagcagggacttctcttctgcctcccggaggcccagccgcaggacgctcaactccacctccagagagccattggtgtagaaaccgaagctgttcagctggatgtccgctcgcttctccccctgccggagaccaaggaggcagaggcagttcagacctctttccgcctgcccagccccaggggtctggcacgaggacctccagaagggcctcctggtacccctctatttaggacaggcccagaggatgacaagagaaagttgagagggacttcctccctgcaggggaagggtggtcctgcattctccgacctctgttctgagaacccaggaacagagatcctgcggcacctggaagtctccccactggggtgagcaccgcccggagaacagttattcacctcggcgtgcctgaccttcaccttcccgaagaacttttacattccagttgagctcccagcaatatttcaacagaaccccccaaatcccattaagtgcccagaggaccccactctatagccccccaggaccccgctgtgcggctccagggtctctagcgccccaaaagtgattccaagaatttaaaggactaagacccagttggggggaaggggggtgtagtccccaagagatggagcctcgcccccgaagggagggggccgaccccagcgaggcggacccggcaactccatccggaggaccgaaggggatcccgggacgagaccactccgggcccggaaacggggggcgccggaccactccaccgcctcggggacgggggagggcggacgagaccactccaagccagggggcttctccgagacaaagttgcgccaccgaccccagaccctcgcgcggcgggcctcaccgtcagcgccagctggtggatgcgcccggagcagccacccagcagcagcaccagaagtagccgctgcccccactccgcggggctcccgcggccgagccccctcctctcgctcactgccatctctggagccacctcctccccgactccgcctctggcgcccaagcccgcccaccgatgagccaatcgccgcacggcggggcccggcctttcggagtttccagtccgccaaccaatcagcaattgcctctccgcaagcccgcctgcttgcgtcaccgacggacagcaccggttccgaatgggagagccgataacgcttaacccccagctcactctcaccaatcgctataaagattgtccggatgtgatttaatgagcagtttatctaaccaattgtcatggatctgatatccggcccttaaagcggaatttctccacccactcttaactgtccgggactacattacccagaatgcagcgggagcagacaagggccacaaagcattaaataaactacctttcccagtatccccaaggacggacttcctcttcttgagccagggatgtggctcccagccagagctgaggcttttggtaaacacacgcatctgttcaggcctgacctgttttcctaatcttcctggtccacagagaggcctaaagctggcctcaggttaaagtttgaccctaggatgacctatgaccccaggctgagaccccagccttaggctaagccttttattccagagtgaggcaattggagccccacccccagattccaggctagaccggactccgggctgaactctgaccccaggtgaactccctctctgcaagttgagtcctaacttcagcctgaaactctgacaccccctcgtcccccacaccacacactgaggcttaatctctggtttaggccaccgatctggactagccctgactccagattggacctgaccccttaccgggttgctaatccttctggttaagcctctggcctctatcccctatccccacggtggtgctgacctggactgaaccccaattccagtttgagtctctgagcagaggtgaactcagaactttgctaggctgagcccccatttgagactagccacagaactcactgggttcaattgcccaactgcaatcagacattttctagctcagaagccaccagcaggtggggccaggtctcagcagagacatcagtcccagtgtgggctcccaaggctctcctcctgggctcagctgtatctctctgttctgggagcctgggtgctctgtgtaaggggaacgtatacccaagggcccccctgcaagacgcccagccttgtctgaggctgcagagaaagcgccaaagcccggagagaatgggagtgggaatccccagtgcctcctctcctctttcattccagcacctcaaagggatttacaaggtgtgaacagacttttatgggagaggtgacagacttcccttctccagggcccagatggcccagatgtctgggggaggggcggagtcggaatctcaggggcagtactgagaatgaaaccaggttaaactggaaaatgggcagatgcaggcgcgaactggaaggcagctggggaaaggcctgggcctggcgccccaaggacggcctgtcttcagtttcccagcggagactctgggggagggaaggcaggatgcggtgcgggagttaatggacctggccttggcgaaggcgcgtcctgggttggatcgaaaccctctcatccgccctgtggccggagggaccagaccattagtgggacgaacctagacgcctggagccgggccggctcgcaagaacggggtgacctcaggttgcccctgcaatggggttgaggaaggacttcttgagtttggggttttagtgtcttggccctttaaggaataattgcggggaaaggggaaaaggagatgggaagaaccgtttggagcggggaaggaagatgagaggacgagagggaccccggggatttggaaaaaatgggtgggggttctttaaggggtcggtccagcggcgtcgagtggcaacgttgctttaaaagggggcggagcgtccgttgggccccgcccccgaatcgcagtgcttgggctccgcgcgggtgggggcgtggcagagcgtgcaggggggcggggaagagtctggggtgggcggggccgggcggggcggggcggggccaggcgcaccgccctcggctgagtctccccggggagggcggcgggcggcgggcggcggggaccgggtgcggtggtggctgcggcggcggcggcgggagcagcatggattggggcactgagctgtgggtaagtccaatcggcccgcctctaagttcccctttgctggggtccaggcaccccccttttgtccccaatgtatcttagagggggctccgcgcctttcccttccaccgacccctgggtccccgccctccaccctccgctctctctcgaagtttatctgggagtctcagcacgctcaggggcgaagggcgactttgccggaccggagtggggaaactgaggcacagggttgcgaatgaggcgggcagaaggaatcctggggccaggccggggcggctgagagaggtcacctattttgggcgccctggccgggcaggcggcttatcttacggcccctgggtccctgcccgtcgtccgcctgtccggctaggaggggggaggggaccctctggtcaccctcatccccacccacgtgggacctagaagtcctgaccgccctttccctcgcctttaatcaacacctaggggctggggacgctcatggaggggaagggggatgctaagctcggcctgatccccctccctggcttccccctgctcaccccaggcccagggcgggaccgccccctggtcgcctataacctcagccctggaagccccagaaatttccccctatcctagccggacctctgacccctccccttgctgggggcggtggaatccctgagttcttagtgcagcgggggtaaccagactgccaccccctcctccaattctgcgatttcttttggatgtgtagtggggtcagtggggtaaattgagtcacccatcgggggatccctggaagcagggagattcagggaacctggtgcctgccccctggccactcaggggcccccagtctgccaggaaccctgcccctctggccttgactcacgccgggccggccggattttccggaatccggggggattaggggagcccgagctgggggagtggccctgtccccttccacgcccctcttggcggtcctatgtcggagacctccatctcccggccggggtggctggggcctgggcgctgttctccggcccttcccgggaaggggagggggttcccgccagtttcctgcctccccccgcgccacgccggggcggcgccgggaagccactccttctaggagcgcagagccttggccctccctgggagtctggtcggcgggctgtggggtcccaaaatcgtgaccccggcccctctcccctcctcccccaccatgtcccatgtcaggatcagttcgaggtgctcgagcgccacacgcagtgggggctggacctgttggacagatatgtaaagttcgtgaaagaacgcaccgaagtggaacaggcttacgccaaacaactgcggtgagaccctggggtggacgctacggaggacgcgcctggggcgacggggagcggtgggagggctgcgggctcagccctcctacctctgtctccccttaggagcctggtgaaaaaatatctgcccaagagacctgccaaggatgatcctgagtccaagtaaggttggagaggggctgcagggctagatttgtggggaaaggcggtgcttgggtctcacttcccctccctcagctgggacaccccaccgctcctctcacttccccttctagaggtgagagcatggatgcaagatgcgggattatctggcttggaatcctgagtccactactatgtagagaaattgacttgggcttgtgactcaggttttctgccactattttccttaactgttaaatacagaggccccagcagttacaaaaccagtaactttgggcagatgacttaaagttttgcgcctctgttttcctcatctgtgaaatggaatgatgacgattcctccagctttgtagggctttcatgaacacgagctgagtgaatgtgtttaaacagtgtgcagtccatatcaaacgccgtaaggagcatttgacttggaattgagtccccaattccaaaatccaaaaaagccctggaaatcaagttgttttggtcacttgtttggcagcaatctctgacctgaactttttgttaattgtagttgttttgttttgtttttgacagagtttcactctgtcccccaggctggagtgcagtggcgccatctcagctcactgcaacttccgcctcccaggttcaagcgattctcctgcctcagcctccctagtagctgggattacagtcacctgccaccatgcccagctaatttttatatttttagtagagacagggtttcaccatgttagccaggctggtaattgtagttttgacttttatcccacttagtgtgaatgttaacacctctcattgtaaaattaaaaaaaaaaatagggttgggcacagtggctcacacctgtaatcccacacattgggagggtgcgcaggtggatcacttgaggtcaggagttcgagagcagcctggtcaacatggtgaaaccttgtctcttctaaaaatacaaaaattagccaggcgttgtggtgcgcgcctgtaatcccagctactcaggaggctgaggcatgagaatcgcttgaacccgggaggcggaggttgcagtgagccaagatcgcaccactgcactccagcctgggcgacagagtgagactctgtctccaaaacaaatagatacggtgtttgattacaaaatgatgtccccaaccccactaagatgatgcagaaaagatggtataagctttgtacaccatctttaaaaactggaaaattctgtgttccaatatacattcgaggtccagtgcggtggctcacacctgtactcccagcactttgggagggtgaggcgggaagatgcggagttcggggggattggagtttgagacctcatctggaaaaaaaaaattagccaggtgtggtggcgtgtgcctgtggtcccagctatttgggagcctgaggtgggaggatcacttgagcccaggagtttgaggctgcagtgagacgcaatcatgccgctgcactgcagcctgggtgacagcaagaccctgtctcaaaaaaaaaaaaaaaaaaaatctactcaagggttggggttaaggaatatggaccagaatttgtcatcgcttcagggattacattcttggggcttaacccttttccacctggaggtgcgtcctggggcatcagcctgctcgggaggaggggcctgactccctgttccccgattctcatccaaccccagattcagccagcaacagtccttcgtacagattctccaggaggtgaatgactttgcaggccagcgggagctggtggctgagaacctcagtgtccgtgtatgtcttgagctgaccaagtactcacaagagatgaaacaggagaggaagatggtgaggagccccccgattcaggttttacaaagggcttctgctggaaccctggcgagccttatcactcttctttctgtagcacttccaagaagggcggcgggcccagcagcagctggaaaatggctttaaacagctggagaatgtgagtttgcagaggtagcagtgactgtggcccggaggcatgggggcagggttgcggatccggagtcagggagctgccctctttgtcagacctggaccttccctcccccataggcttccagtactcccttgacccctacttactggatgacatcccaataatccctgaaaccttggtttcccaccctgctgtctttgggatggtggctccctcactccggttctgtcccctacacagagtaagcgtaaatttgagcgggactgccgggaggcagagaaggcagcccagactgctgaacggctagaccaggatatcaacgccaccaaggctgatgtggagaaggtgtgtgtggcgggggcggggggggggtgcggggtctgggacaagcttggggagtccgagtgggacgtgatcggaacctggcagtaccttccacctctgcattcttcaggccaagcagcaagcccaccttcggagtcacatggccgaagaaagcaaaaacgaatatgcggctcaactgcagcgcttcaaccgagaccaagcccacttctatttttcacagatgccccagatattcgatgtgagtgctcccagttctcagacctaccttcccgaaagcctccaaatgttagccaactcctacgcattcatcaaaaccccagctgcaatgtcccagtccctagattgaaagggaatcagaaacctatagtaacagtgagctgtgcttttagtcagctgttcttcctgctgggcatgccttttacttgtttgtttatttacttctatagagagatggggcctggctctgtcacccgggcaggagtgcagtggcataatcacagctcactgcagcctggaacccctgtgctcaagtgacctttctttctttttgaaattcctacttattcttctaagctccacctctaacaacccctctgaaaggtctcgaatttcccctctcctgtttcaatctagcgctccactctctgtcccatccgtggccctgggagtatcagggctggttctgctttttcttcaaatccctgttcccttgtctcctcctttgagaagcctttgctgaccccctaggcacgcgtccccctctgagatccccctggccctgtgtctcttccccaaccacagtgggctggagtctctcttcccgactctgtcttcccctccagactggcttggggctggggccagcgtggagcgcgatcatatttgcagagtgaatcactgtgcttctagtccctctgttagcacccctgagccacccttgtccctgtccttacagaagctccaagacatggatgaacgcagggccacccgcctgggtgccgggtatgggctcctgtcggaggccgagctggaggtggtgcccataatagccaagtgcttggagggcatgaaggtggctgcaaatgctgtggatcccaagaacgtgggtgcctggtctgggtccactgggctacgggaagggcagagggaggtacccataggctaggcactcgactgctcatccactgtccccctcccccaggactcccacgtccttatagagctgcacaagtcaggttttgcccgcccgggcgacgtggaattcgaggacttcagccagcccatgaaccgtgcaccctccgacagcagtctgggcaccccctcggatggacggcctgaactccgaggcccgggtcgcagccgcaccaagcgctggccttttggcaagaagaacaaggtgggggccgggacccttgggatggtgggggagaaggacagtgaagtggggacagtggggcccctattgagtcagccccagccgcctgaacgccgagtctcgggcaggaattttcctcttggctgccagcccggactggagggaaggaaggcggccgattggcctgggagtcccccgaggcgaaggcgggggcagggtggggaggtggggaggtccgtggcgtttgtctgctgcttctcgggatgctgggagaaaacctgctggtggaattcagggctggcctgagggctggtgacaccatccctggggactccccgagtttctctctccatcctgctgatgggactctgggagccgccctgcatgtcttgctttcttgggtttttggattttaatataccttagcacccttggtttatacctttgatttatactttgggtccctcttcacttacactctcatacctctccttgacttaacacctgtgatccccgagcttaaacttctgatgcccctaacccctctcattttcctgccttccactccctctcggcttgtggttttatttttgtttatttatttttgtcctctgtggcctcttacctgtctgagaccttgattcctgcatgcgtcttctagactgtcagcccagaaagctaagtggacagagagacatgggcctccctgcctcctggacccatgcttgctcccggacataacattccagagacctaggagataccgggggagtgagagttctggctttcgggcttacagttcaacatcctccccgccaccttccagatttttttgtgtcgctcctgcatgcgttttctctgtgtggttgtgcatcttgagttgtggttttcttaccgttttttttctttctccattttgtttttcctttttcctttttttgcgtccatccgtccatccgtgcgtccatccctccgtccattcgtcctcactctctacatcctcctatgcccccccaccccttcaacctatccccctccccggcccccgccggtagcctcgccccccacccctctcccccctggggggccccgtaccctcggcattgcctaacggacccccgtccccccgctccggccgtgaccccttggccatactgagcgagatcagtaagtcggtcaaaccgaggctagcatccttccgcagccttcgaggcagccgtggggtaagtgaggcctcggggcaggaggaggtggtggccctagcctgcccagcggcgggtggcgggaccctgggctcgcttcctgccgctggctgggcccctcttccctggttgcccaacccagacctgctttgctctgtgcatggcttcgctgtcaagaaccatggctggggaagggagtgaaatatctcagacgggtgcagagtctggcaggctagactccttgatcccaaattcagccctctacccaccttgcagacagtggtgaccgaggattttagccacttgcccccagagcagcagcgaaaacggcttcaacagcagttggaagaacgcagtcgtgaacttcagaaggaggttgaccagaggtaaggtggtggggtagggaaggacaggcaaggaacatgataaaatagtaaatgaacttcacttatttgtttattattttattttatttattttattatattttattttgtgacagggtcttagtctgtcgtccaggctggagtgcagtgctgtgatcttagctcactgcaatcgccacatcccaggttcaagcaattcttgtgcctcagcctgccgattagctaggaccacaggcatgcaccagctaatttttatatttttagtagaggcggggtttccccatattagccaggctgtcttgaactcctggcctcagttgatctgcctgcctcagcctcccatagtgctgggattataggcatgagccactgcccgggtctgtaaatgaatgacatttaaatggtactcaaagatctccccaataatcccaaggccccgacggttttacaggtgattcctaccacacttagttacttcttggccaggtgcagtggcctgtgcctgcaatcccagcattttgggaggttgaggcaggaggatcatctgagcctaggagtttgagacctgcctgggcaacagagtgagaccccatttctagcaaaaataaaaaaattagctgggtgtggtggtttgtgtctgtagtcccagccacttgggaggctgaggtgggaggatggcttaagcctgggaaatggagactacagtgagctgtgactgcaccacttgcacttcagcctgggtgtcagagtgagaccctgtctcaaaaagaaaaaaagaaacagttacttcttgtcttatacaagtcattccagcaaacagaaaaagtgtgaaagctgtcaacctctttaggctgaagaatcctgattcccaaatctgtggccaagaattcaataagataaaattaagggctcattttaccttatttatgatcatagaggcaaaatcctagccaagcaaatccagtgtttaaaaaataatacatcactttgggaggccaaggagggcagatcacgtgaggtcaggagttcgagaccagcctgaccaacatggtgaaaccccgtctctactaaaaatacaaaaactagctgggcattgtggcacgcgcctgtaattccagctactcgggaggctgaggtgggagaatcgcttgaacctgggaggcggaggttgcagtgagtcaagactgcaccactgcactccagcctgggtaacacagcgagtctctacctcaaataataataataataataataatacattagccgagcacagtggctcatgcctataagcccagcactttgggaggctgggtagaaggatcactcacttgagcctaggagttcaaggccagcctgggcaacgtagtaaaaccccatctcttagaagaagaagaagaaaaacccaagtaaatttttttaaaaactaaaaaaaaaaaaatccaccattggttgggttttatcccaataatgcaaagatagttcaatatcaaaaaatgtatccatctagttcaccacattaattggctaaaagaaaagcagcatatggttatctatttaatagctcaaacacttaaaatattgacaataaaaaaatctggcagattaaaaaaaaaatctttactcactctttccaggcaacaaaatcctcttcccagttctgttacataataggaatgatgtttgccacttgcaaacaggcagccaaattatattttgccatttgcatgtaacctcttggacagaatggcttttattggtgtaaagttccattcagaactctctagttcctgagtttctacggtggaggggttaagggtgcatgttctagagtcacgacaaactggacttgatttccagcttcatctcaggacttgggcagcctgttttaccttttaattcctcagtttcttcatctgtaaagtggatcaggtattagaactggaatgaagttggcagggtgcagtggtttatgcctgtaatccaagcactttgggaggccgaggcaggcagatggcttgagaccgagtttgagaccagcttggccaacatatggaaatcctgtctctactaaaaatataaaaattagccaggcgtggtggcgtgtgcctgtagtcccagctactccagaggctgaggcacgagaatcacttgatcccgggaggcacaggttgctgtgagccgagattgcgccactgcattccagcctgggcgacagagtgagactgtgtctcaaaaaaagataaaaaataactggaaggaagttgagctcagatctggtcttttccaaaggtccattatagtcgtgactacctgtatatatagacataggggagacagggatgagaaactgatgataatgataacagtatttattagtcacttactgcattctaggcactattcgaaacagtgtacatggatttattcgaattttcaaggtttcctgagagattgtatgcagacttaagatctgtcttgtttagtgttatatttatctttatttattttttcccctgcccccccttctttttttattttttaaaaattattttgattttttactagagacaaagtctcacaccattgcccaggctggtcttgaactcctggcctcaagtgatccttccacctcagcctcccaaaataatgctgggattacagatgtgagccaccacggccagcccagtgttatatttctgatgcttggaataggacctgtatgcagtaggtactcaatatgtatatgagtaatagtgaggacttactaggtatcaggcattgtattaatcctcacagtgacccacatgagatattaggatcattatctccatttccaaaataagcaaacagcagtgggggttcaatgatttaagccaagctcacacagctaggaaatattcaaactgagattcgaacccaggcagtcgggcactagtatttgcatccttaaccattgtcctgccttgctatttgctccttgatgcaaaacccctgttttttgcttgttaaatcacatggagcccggtgctgtggctcatgcctgtaatcccagcactttgggaggctgagccaggaggatcccttgaactcagcctgggcaacatagccagaccccatctctactaaaaatttttgaaaaatcaggcgagtgtggtgatgcgggtctatagtcccagttactcaggaggctgaggcaggagtatcacttgagcccgggaggttaaggttgcagtgagccatgattgcaccactgcacaccagcctggggaaagagtcagaatgagaccctgactcaaacaaaacaaaacaacagcaacaaaaaaactcacacggaagtatgttttcctgtctatcctgtctcccttgtcatagggaagccctaaagaaaatgaaggatgtctatgagaagacacctcagatgggggaccccgccagcttggagccccagatcgctgaaaccctgagcaacattgaacggctgaaattggaagtgcagaagtatgaggtcaggaaagaccctggggaggggcgggagccagcgggcctggctgagtcactgctgggtggggtggggggtcggggacaggggaggtgttcggagcggggggtctccagctgttttccatcacagccttggctgtgcgtgggtgatctcagggaacctctgggtccaaagtgggctgaccccggagctctgccctggaacgattttcctgtcccctcctcccaggcgtggctggcagaagctgaaagtcgagtccttagcaaccggggagacagcctgagccggcacgcccggcctcccgacccccccgctagcgccccgccagacagcagcagcaacagcgcatcacaggacaccaaggagaggtgaggggtgacgtcagagtgggtctgttcccagggtcccaggagggcctgtctttatctgccgaattatccccaaacagctctgaagagcctccctcagaagagagccaggacacccccatttacacggagtttgatgaggatttcgaggaggaacccacatcccccataggtcactgtgtggccatctaccactttgaaggtgagaacggccagagtgggcttggcggggtatgggaggcagtgtctctggctaggttcagtttaaattcgcctaaagcagggctgggcgggtggctcaggcttgtaatcccagcactttgggaagctgaggcaggcagatcacttgaggtcaagaattccataccagcctggcgaacacggtgaaaccccatctctactgaaagtacaaaaattagccaggtgtggtggcgcacgcctgtgatcccagctactcgggaggctgaggcaggagaatcccttgaacctggaggcagaggttgcagggagccaagatccgtgccactgcactccagcctgggcgagagcgaggctctgtctcaaaaataaaaaataaaaataataaattttgcctaaagcagatctgggcccacccccacccccatcacagggtccagcgagggcactatctctatggccgagggtgaagacctcagtcttatggaagaagacaaaggggacggctggacccgggtcaggcggaaagagggaggcgagggctacgtgcccacctcctacctccgagtcacgctcaattgaaccctgccagagacgggaagaggggggctgtcggctgctgcttctgggccacggggagccccaggacctatgcactttatttctgaccccgtggcttcggctgagacctgtgtaacctgctgccccctccacccccaacccagtcctacctgtcacaccggacggacccgctgtgccttctaccatcgttccaccattgatgtacatactcatgttttacatcttttctttctgccgctcggctccggccattttgttttatacaaaaatgggaaaaaaaaaaaagaaattatataaagttcctagagtcggtgtcttattagaggatttaaatactgggactggaagtatctaacaccacgtttcttacaggccacacagggaatgaggaaggggaggtgatcttgggcacaccttgggtcaaccctgcccctttctggaagttggcctatgtcattgtcagtgggtgtctgcttgtgactcaggtagggagaaggataccaagtttcttttttttttctttttgagacagtctcacccagttgcccaggctggagtgcagtggcgtacgtgatctcagctcactgcagactccatctcccgagttcaagcaattctgcctcagcctcccaagtagctgggattacaggcacacaccatcatgcccagctaatttttgtattttttgtagagacagggttttgccatgttggccaggctggtcttgaactcctgacctcaagtgatccatctgcctcggcctcctaaagtgctgggattatggcgtgagccaccgcacctggccaggacacccaagtttcatcccttctgaatgcactgcagcttctgagaatgggtagcacttattgaagacctactgtgtgccaggcattctccacctggggtctcattcctggccacaattcttagaaagtacacagcctcaacttttacattttttaaaagttttttatttttcagtttttgtagagatgaggtctcaccatgttgccctggctggtcttgaactcctggcctcaagccttccttccgcctcggcctcccaaagtgctgagattacaggcctgagctgctgtatggctatgattttgttaaaggccgacacagaggtgaagtcaactgctagaaatcacggcttttaagaggtggagtcacatttgaactctggcctctgatgccagatctgcaggtcacatgttcaccatggtccaggtgaccctgactgcggtccccacctcttctgtgaggcacagggcaggattccacctgaggcgcgaggagcctgggacgactcctttggtctcttctggggttcgcaaaaacctgggggtcccgggtgtgaagaagggtgtctgcgctctcagcggtcaggctccaggcgctgcgacaggacgccgaggacgcgctggaacttctcaaagcgttcagcgcgcggagctcccgcgccccggctaccccagagcagcctccgcacgaagccggtggtcagggcctccctcagctccgggttaggccggaatcctggaagcaaggtcaggtgggctgggggcggggcccaggcgcccgcctcgcccctcccaacctcccggcaccttcctttccccagaggactttgacccaacaggggcccgggagggacctgccccacctgcgggatgactaggcggggtcagaggggagggggcttccagctctctgcaggaatgggggtggggtgcctgaggggctctaccgcagtgcaatggggtggcctgttccaggtgccagatcctggaggtcccgccttaggggctgtgcctggacgtggggctgccccgaggacgggatcccaggttgtcggggaaggtggggggatcttgccgggtgggctgccctaggataggacggaggagtcgttttggagggagcagggcgttcttggggatcgagatccctgggggacgggatcgtcttaggtgggaagggggagtggggacccgcggaggtggctctgggggcaggacagcccgttttgaggtggacggccctgttcctatcaataccgctggatgcagcgtttgcttggggtgagaaccttcctggagtggagccgtcccagtttgggtggggctccgggaggcgtggcgagaggctcccctcctgggacaggctgggtttgggggatccggttagaacctgcagggtgctctgaagtctgcagtccagcgcagagggaacgctcacctcgcaggcgctgggctgccaccttgcggaatttgggtgcgtcccggaccatgtgacgcgccccgtgcagggtgcgcaacagccgctcacagctctcgtccagcggccccgcgacttcctcgccctccagtaggcgaaccatgggtgccacgtgcggcagcgccacctcgccggggtcgcagggtcctgcggagggggagggtctgatcagggtttggggctgtagatggggcatagggcagaggtggaacctaggacaaatgcaggggcggggcttaggactgagcgacagcggggtctgtggagaggggccaggaccacacgccccgtatggagggcggggcctatggcgaaggggcgtagcctagggaaaggggctgggaccaaggctggtgggggcgtggcctaggaacaagtctcgtgtggagggcggggcctagggaaagggccaggaccaaccctcatgtggagggcggggcctatggtgaagggaccgggcctagaacagatgcagggactgggcataggactagattgagtcctgttaaatttggtctgggcccccaggggatgctaagccccagaccttcacttaccagcgccctcatccagagcccgcatcagcggcttcagctcctgctcaaaggccagcgcagcctccgtgtggctccttcggagctggcgccacgtgtgctccaaccgggacacctgggagaagagatctgagcacgcctcctctccagtcttcccagtcacccgcactccagcttcctccagtccctgctccccacgaacctggggcatgagcagggcgcccatgactgcagccagcccgggcaggtcccccgccgcccctggccgcagcgccagcgccagctctaccagtcccctcagtgcggctgcgcgctcctccagcggccccgagcagcccagcaccgccagcgccccggccagcgccagtgtctgatgcctgcagaggtggagggcaagggtctgggggaagtggggaggtttgtaatgcaggggtgaggggggacaggaggtggcattgccccatctcccttcttccctggggaaccatgagtggggagctgtttggagatcttgggaagtggggggaattggcctcccccaaccaagattacaagctgctggctcacctctccagcagttccaacctcaagtggtgtccatggggaagagtgagcagctccaggccagatgagactcccatgttgccccgctgatctctggtcactcccaggaggcctgtggcctgcagaagggaatggggaagtcaggtgaagcgtgattatgtaggcatggttgggtcttgccctgggcctggggaggagcatcccaggaggtgacccacctggcagtctaccaatagcaggtgaagggcggtgctcccaggatggtgctccaggaacaggccacggagggtatgcaggacttggggttccaggggccgattctgggggcccagcaggcaggagggggcatcatgggggcagaaagagatctcagcctgtggtcttgtaaaacatctattctcttcctcctcatcctcctcggcctcccaccatggggcctctggctctgggcagctttggctcggggatgttccctggacactgggcactcggggcaccagctcgcagtacgtcgggggacgttcagaggcatcaggcagttcgaaggagggtgtccgggggggcttcgttggtgccttggcttgaagctgcccatcggaggccctgagactgtcggcaacagttcccaggggagcaggggccttcagcaacaccgggtcactgctcgttcggggcaaggcagatatgggcatggtggaggcttctagaggtcatacaagaggggtcaatgggaatacacagggaagattgctgaatgggcgggggtgagagcttcatcggctaccacccacctgatccatccactcattccaataatggggtataacaacctatccgggtgcagttttgaatttcaaccacctcgacggtagaaatgctacatgcttacacatggttagaaaactttagcatctctatagttctgtaaattatttttttttaattttattttattttatagagatgggatctcactgtgttgcccaggctggtctggaattcctagtctcaagcaatcctccctcctcggcctcccaaactgctgggatcacaggcatgagccaccttgcctgaccctatgaattctgaatactacattttaaatttgaattctttgtttttgcccctctgactgaaagatggtaagcagtgacccaacgaaattaaaaatttttttaaaaaaaggatgagcgtggtggccgacgcctgtaatctcagcattttgggaggccaaggtgagaggattgcttgaggctagggattccagaccagcctgggcaacataacaagatcttgtttctacaaaaagttagaaaattagctgggcatggtggcatgcacctgtggtcccagctacttgggaggcagaggtgggaggatcacttgagccagaggctgcagtgaggtatgactgcaccactgcactccagcttggatgacagagtaagaccctgtctcaaaaaaaaaaaaaagatatctatctatctacaattaagtgatatatctctctatatcatatctatagagatagatatatattatataaatatataatatatatttaaattaagtatatgttaaataaaattaacattattaaatgtataatgttgccctatatactacatataattacatttatatatgatagatattttactttttttgtgataatatatctctccatagacatatctatataaaatatatacaattaatatagatatctatagagagacaaagtataaaaaattcacaaagctgcgtatggtatgacactcagataagtgtcaaagaaaccaagcttattaaactttcttttcttttttttcttttttatttcttcttaaaaaaaaagatacatgtgcagaatgtgcaggttcagtatctgtgtgccatggtggtttgctgcacctactgacccctcctctaagttccctcccctcatcgtaaactttcaaatgacgtcctttgtaagttggtggcatgttgatctcctggactattagtacttaaaactgtactaagacttttgggagactgtatttaccatgcctttgaataggctcttttctaggaacttgaaatcatccaacagtgcctggctcactctgagttaaggtccaaagtgctcacagtagctgaaaaatcctcacaatctgagccccagggtctctctctctgactctcccctcattccctctgcttcagctacactcgtgtgtccctccttccctccctcccttcgttccttccttccttcctttcttttctttcttgacggagtctcactctgtcaccaggctacagtgcagtggcgccatctcggcttattgcaacctctgcctcccgggttcaagtgattctcctgcttcagcctcccgagtagctgggaccacaggcgccaccacacccagctaatttttgtatttttagtagacacggggtttcaccatgttggccaggatggtcttgatctcttgacctcgtgatccgcccgctttggcctcccaaagtgctgggattacaggcttgtaatttctggactattagtacttaaaactgtactaagacttttgggagactgtatttaccatgcctttgaataggctcaacctgcacattctgcacgtgtatctttttttttttttttttaagaagaaattgagccattgcacccagccctttcttttcttcttctttttttttttttttttaaatttgagtcagggtctcactctgtggcccaggctggagtgcaatggtgcgatcacggctcactgcagccttgactttctgggttcaaggagtcctcctgcttcaacctcccaagtggctaggaccacaggcgtgcaacaccacacccagctacccactcattttttggttgaatgaacagcttaaattcttgttctgacccaagagcctttgcactgcctcttcctcctgcctgcttatcccccagttatccacctgttccctccctcatttccttcaattttatttttttctgcaatggggcctttcctgactaccacttaaaattgcttgcttgggtacaatggctcacgcctgtaatcccagcactttgggaggttgaggtgggtggatcacctgaggtcaggagttcgagaccagcctgaccaacatggggaaaccccatctccactaaaaatacaaaattagcagggcgtggtgcacatgcctgtaatcccagctactcgggaggctgaggcaggagaatcacttgaacccaggaggtggaggttgcagtgagccggtatcacgccattgcactccatcctgggcaacaagagcaaaactctatctcaaaaataaataaataaatagaaataaaataaaattgcaatatacatctccatctttatagtctctatctcccttactctgttttttttgttttgttttgtttttgttttttcggtttttttgagacagtctcactctgtcccaagtagcttggattacaggcatatgccactacacctggctaatttttgtattttattttattttatttttttttagtagagatgggttttcaccatgttggccaggctggtctcgaactcctgacctcaagtgatccgcccaccttggcctcccaaagtgctaggattacagacctgagccacctcacccttcccttactgttttttgtttgtttgtttgttttttgagacagagtctcactctgttgtccaggctggagtgcagtggtgcaatcttggctcacggcaacctctgcctcccgggttcaagcaattctcgtgcctcagcctcccgagtctcccgagtagctgggattacaggtgtgtaccaccacgcccggctaatttttgtagttttagtagagacggggtttcgccatgttggccaggctggtctcgaactcctgactttaggtgatccgcccgccttggccttccaaagtgctgggattacaggcctgagccactgtgcctggccttcccttcctgtgttttaattttcatcttgaagcaaacaaaattgccttatttttgtggttcatggtttgttgtcctctcgtggactgttggctcccatcgggcagggatctttgtctctttctggtttgttgatgtatcctagcactccgtgcagggcctgggatgcagggacggctcatgttgaatggggttgggagaaggatgggaaaaaaggggcatgagggggcattcaggtgagtcctcctttaggtaagaccgtcagactcaactgctttgaggaacttaccctggatggagaggagccactcaggaaaaaattaggggaatgagaatgttcccgtcactggtggaaatgtaaaatgcaaaggccccgaggcgggaataaaagcctgagggttcgaacaactgcaaggagggctgtgtgaccagcatgaggagggtacgtagcagaagttgttagcaaggtaagctgtggtcagaacaggtacagctccttggaataattgtaaacacttttttttttttttgagatggagttttgttctgtcacccagtctggagtgcggtagcgccatctcggctcactgcaacctccacctcccaggttcaagcgattctcctgccgcagcctccagagtagctgggattacaggtgcgtgccaccacgctcggctaattttgtgtttttagtggagatggggtttcaccatgttggcaaggctggtctcgaattcctgacctcaagtgatccaccggcctcggcctcccaaagtgctgggattacaggcatgagccaccgcgctcagccttgtaaacacacattttaagcacccacaaagtccctgcatgttttaagtcatcgtgattgtcatcattttctaaagcaagaaattgaggctcgaagaggtgcctgcacctgaccaagatctcttaggtggtgagtggcagagccaatccctgagccacaggccattctagcagacacttacccatcccagcggggtcttctcttgaccgccccatatgtgccaaatctgcaggctgactgttgctccacttccttgccctgggggacagaagtgggagaaacctgtagtccccacctaagcagtgtcccccaccaatatctgcaaaaccctgtgtccagttactctgtaccagtgagtctcaaccaatcaaggtgacctacgtccaggggactcttagcaacgtgtggagacatctttagttgtcacaactagtagcatctagttggatggagctcaggaatgctgctcagcaccctatgatgcacaggacatctccacctcctcccccacaactaagaatgttcgggcctcaaaagtcaaccaaggccgggtgcggtggctcacacctgtaatcccagcactatgggaggctgaggcgggcggtcacgtgaggtcaaaagttcaagaccagccaggccaacatggtgaaaccctgtctctactaaaaatacaaaaaattagccaggcgtggtggctcatgcctgtaatcccagcactttgggaggccgaggcgggtggatcacttgaggtcaggagtttgagaccagcctggccaacatggtgaaaccccgtctctactaaaaatacaaaaaattagccaggcatggtggtgcacgcctgtaatcccagctactcgggaagctgagacaggagaattgcttgaacccgggaggcggaggttgcagtgggctgagatcgtgccattgcactccagcctgggcaacagagtgagacttcgactccagagaaaaataaaaaataaaaaagtaaaaaaattagctgggcgtggtggtgcactcctgtaatcccagctactctggaggctgaggcaggagaatcgcttgaacctgagaggtggaggttgcagtgagctgaaatcatgccactgcactccagcctgggcaacagagtgagactcagtcaaaaaaaaaaaaagtcaaccattgagttggaaaaccctgcgagtgttgggtgttctcaaggaggcagggagactgtgagtacctgagaggctctatccgagctgggccatccatcagggtgtcctcgctaaagctgcgtcgcagaggcccctgccaagtcacaggcctggagaccacagcccctgtggcctgggacagtgggcgcctgcctgtcatataactgtgaaccagagccggtatgctggggaattgctcatcctccagttgaaagagggctgtgggtcggcctggccggggacgcagggccacacggaacacctcaaaatggagggctgagccccgccagcggcaggagatcacggggttgcccccacgggacccagaggcgcgaaccaggaagtcgccattttgctgaagaagagcttcagccttctgtggatgaagttcagggggcaggggaattaggaatgagtccagggcagtggttaatggtagctccccccaccattgcccccaccacccaagaaaagctaccccagtgaaacttctgtggcaggcaaagacggggaactttcacaccaagttctgtccccctttctcctggcacctacgtagactacatttcccaggttcccttgcggctagggttgtcatgtgatgagaactggccaatgggatgtggggtagaagggctatgggaaatatccagacctggcgcataaaaccctgctgcacaatcttataggttgtgtcccctgtctgtcagctgatatcccccaaagcccagagggatgacagagctacaagatgcacttggctcccaactgatttatggagctttgcatctctgcttctcaaccaccttggactatgacattaacatgttgactgtgtttagctggtgatatcttgggaatgtttgttacagccactagctgatgctgaccaatgcaacatctaatttggtaaatgcactgtgcttgttatgcaaatgtggcttcaagagaagccattagctggatgcttccagattggggccccctcttttataaacatttgcaagcagtcttatgccagctgtggtggctggtgtcaaaatagggtaggaagggtggggcacagtggctcacacctgtaatcccagcactttgggaggctgaggtaggcagatcacttgagatcaggagtttgagaccagcctgggcaacatggcaaaaccctgtctctaccaaaaaatataaaaattagctgagcgtggtggtgtgcacctgtcattccagctactcaggaggctgaggtgggagaatcgcttgaacccaggaggcagaggttgcagtgagccgagatggagccattgcactccagcatgggtgacagagtgagatcatgtctcaaaaacaaaaaaaaaacaaaaaaaaaaacaaaaaaaaggcttggggaggcaggtagaagggccaggaccccagagagaggcaaagtagagctgaacatggggtctggggactaaataatagatgtagcagacacacgtgtgtagcccttactatatgtcaagcactgctttaaatgtaaagggtgttaactcttgtaattcctgtaacaagggtggtaggtattattatacctttttttgttgttgttctttgggacggagtttcactcttgttgctcaggctggagtgcaatggcacaatctcggctcactgcaacctctgcctcctgggttcaagcgattctgctgtctcagcctcccgagtagctgggattacaggtgcatgccaccatgcctggctacttttttgtatttttagtagagagggggtttcatcatataggtcaggctggtctcgaactcctgacttcaggtgatctacccacctcggcctcccaaagtgctaggattacaggcatgagtcaccatgcccggcccatttttttcttccggccttttttttttttttttttttttgagtcaaggtctctctcgattgcccaggctgagtgcagtggagcactcatggctcactcacagccttgacctcctgggcttaagcaatcctcccatctcagcctcctgagtagttgggacaacaggtacatgccacccatgcctggataattttcgcttttttttttttttttgtgtagagacagagttctgctatgttgcccagactggtttggaactcctgacctcaagtgatcctcctgcctcagcctcccaaagtgctgggattacaggcatgagccaacatgcctggcctgctatccctatgttaaagatcgggagactgaggcccagagaggtcaaatgtcctgcccaaggtcacatacaatataaattgtagggtttggatttgaacctagggtgtctgggtctcaattatgggattttaactattaagttctactgcctctcatgatttcatgagatgctcagggtcccagaatttttgggggtgacaactgagtttcagatggaggtgggagcctcagatttatttgtttgtttatttatttatgtttttgacagagtctcgctctgttacccagtctggagtgcagtggcacaattgtggctcactacaacctctgcctcctgggttcaagagattctcctgcctcagcctcccaagtagctgagactacaggcgcataccaccatgtctggctaatttttgtatttttattagagatggggtttcacaatgttggccaggctggtcttgaactcctgacttcaagtgatccgcccacctcggcctttcaaactgttgggattacaggcgtgagccaccatgcctggcttgggagcctcacatttagagggaaataccaggaggtagatggagttcagagggagagacggccagagccaagagtagtttgggggcattaggactctccttaagctccatcaccaatctcatcatcccaaagaaagtgataatttaaatatagtgacagtccccagccagccaaccttcaagacagtccccagccctctgccacctgtcccaatagaccttggcactaagtccctcatccagggacccaggaatcctcagcaagggtgggagaggctccccaccagatggtgctgaggtcctgctgtgggtggtacctggcgggacaggaggccgtggtaccaaggttggccagcaaggtcttctccatcctgtggcacctgcatggagctcttgggaacagagggtgccagggctgagctctgcactttcaacaggcctcagtcttccacatctgtaaaaggggaataattagccctgcttgagtgtctgggtcagctcctttcatcctcttcttaattttggagacagctccatcaaatctttttttttttttttttttttttttgagacagagtctcattctatcacccaggctggagtgcaatggtgcgatcttggctcactgcaacctctgcctcccagattcaagcgattctcctgcctcagcctcccaagtagctgggattacaggcatgcaccaccacacccagctaatgttttttctttttttatatttgtagtagagacagggtttcactgtgttcgccaggctggtcttgaactcctgacctcaggtgatccacctgcctcagcctcccaaagtgctgggattacaggcataagccactgcacgcagacttttttttttacatttaaagagagaggtcttatgtgttgcccaggctggagtgcagtgctattcacaggtgtgatcatagcacactttagccttgaattcctgggctcaaggaatcctctagcctcagcctcccaagtagttgggattacagatgtcaccatcgtgcctgttccaaatataatgcaatcgaagaaaaaaaaaatggctgaagatgacaacatgccaccccatcttgcagaaatgtaattaatgaattcactgaacccctatttattcagcaccttatggggtcccaggctctgttctaggccctagagacatagcattgaacaaaacagatggaaatctctgtccttgggagctgacattctactggggagcagcacctcagaaaagaactagatgatggcatacatgagtgagtgctagacaaaaaaactaaaccatggatgggatataatgaaagtacaggtgctagggtgaacactcttttttttttgagacagagtcttgctttattgcccaggctggactgcagtggtgcaatcacagctcattgcggccttgacctcctgggctcaagtgattctcccacctcatccttctgagtagctgggactatgagcgtgggccactgtacctggctaatttttttttttttttttttttttgagatcaagtctcactctgttgcccaggctggagtgcagtggcatgatctcagttcattgcaacttccgcctgctggtttcaagcaattctcgtgcatcggcctcctcagtagctgggactacaggtgtgtgccaccatgcctggctaatttttaaaatatttttaatagagatggggtttctccatgttggccaggctggtctcgaactcctgacctcaggtgatccaccctcctcagcctcccaaagcactgggattaccagcatgagccactgcgtctggctgtgcctggctaatttttaaatatatatgtagagattgggtcttgccacgttgcccaggctgggtgaacatttttgatcatgtgaccaggaaaggtctcattgagtaaagtctggaaggaattctggggagtgtgccaggtgactctgggtgaaaaaacatcccagtcagggggaatttaacttacaaacatccatggcttctcggcaacctatgcgcacactcagaggttctcaggataggtgcagatctaacccctattctttgctttagaatgcaacgctgggggccaggcgcggtggctcactcttgtaatcctagcactttgggaggcagaggtgggtggatcatctgaggtcaggagtttgagaccagcctggtcaacacagtgaaaccccgtctctactaaaaatacaaaaattagccaggcatggtggcgtgtgcctgtagtcccagctactcaggaggctgaggagagagaatcgcttgaatccaggaggcagaccctgcagtgaaccgagatcacaccactgcactccagcctgggtgacagagcaagactccgtctcaaaaaaaaaaaaaaaaaaaagaatgtaaccccagggttaagatttttaaaaggtcacattttgtagcaatgtcagcaaacagcaatgttgcctttgcagatccttctatttcggagcccatacatgtggttatcatgatgattgaatttggatctcagacattttggtagtttcccgataatctcacaggcctcagggccagtgtgtctcaggtgtctggtgggggagatttctctggatggtccagaagaagataatctgcttcttactctcctgcaagctctccctgcagccctgcaaagtcttctggtggggtctgcagagaaattcctgcctcctgagtcagcaggaagttcccagaccagccctaggtggctttaggggaggagcgctgggcagggagccagctgccagtgccgcatacctgaagccaggtgtgtctttgcaatgcctgcgcacttcctgtttgtcacctggaccagggctagcctcggtcgcagagtttcccaaccccaagttcctgtcttgtgtctcccttagtgagagtgaagttgagtcaatggcaaggttctggttagtttgaggacacagggtggccataggtcagccaaaggccaactaagccatctcctgcctctgagtcctttgggatcatttattcgggcacggaagagaagaaacgggcagaatcaggaatcagaccaagcatagagagaggagagaggggattattcatgttccagttggatcataaacatgtgtccacgtgtggggaggacgtggagggtgggaaccaccagcacaggcaacacaaacacagatgtaggcaggactcgcttttgacgttggacgaccattgctggagcacttgctgtgcaccaggctctgttctaggacctagagatacagtgactaaggagattaaagctcggcaccaccctgccctccagagcttgcagtcggctgcgcaagacagactgcaaacgagcacaagatgaatggagaagacagaccatttctaagagttatcaatgaaagtgataagccagggagatgtgatagaggaggctggacaggacagcctctcctataaagtgacattggaactgagacctcagtacagaaggaggcagttaggcaaagatttggaggagtcgcctgggtgaggggtacagtaagggtaaaggcctggagctgagatggacttgctttttacattttacatcatcaaggcggctggtgtagccggaatacgatgaggaaggagtagataggagggcaatgaggttggagagatcaggaggagagactaggcaaaaactagtggactttgaattttaatctctatgacccaagggttttaagtgaaggaggggcccgatctgattcgccgtttaagaggatcactcaggcaaaaatggaaacaatggctttctgtgctgcacaggaaatacacttagagaggcacgcccaggtgagcccgagcacaccgacacgcgtaacgcacagcgaccctctcattcgcgaggcgacctcttctaccccagatcctccctgcgagccggtgaccccacctggaaagagaggactccccatcccaataatcctggttctggatctgccctggggctccactcacctgggcaggacccgcggggctcccacgaggctgggtccaggcggaagctgaggctccgcggctccgggctgctgtcacccccgccctccaccttgccaccgccccagccttcccagaccacacctagtgggaactcagcccagttacctgaccacacctcctgcagaccccgccccctgcgggccccgcctcaaactaacttcccaggcccttgctccgcccccttaaaaccattttttttgctactagccacgcctccttctgcatcgcaccgctttctccatagaccccgcccactaggggagcaccacgcatcctttcctgccagtggcccctccccttgtatatagccacgaccaccgccgaatgactacgcccacccgcagccacctccttctcagccccgccccttagggcaatagaagaaatttcatcccaacgttcccgccccttagaaccctgcccctcccttccacccaggcggccccaagcacccatggccctttgggaccagggcggggtggagtggggtgcctctctcccctccccgccaaggctccgggtcagggcagggcaactccctcgggctcttacgccaggctggggtagctgcggcagctgtgacgtaaggaggggtacgcttcctccagaccgccctcccggattttccggaaagaagccccatttaggtggcgggttttgtggagagacgtccgggaaaacgcgacagcttccttcagtgacagcacgctggagcggggcgggactttggtggaggtggaaggcaaatcattcaggtggtttcccaggtgggaagaagggtgggggggacttccatcgtgatgcctggagacgaacaagagaaaaggtgacagggacctagtgcaagagagaggactctttggccacgtttattgatgagttcctcatattaacatcagtcttgtcttgtagagacagggtcttgctatattgcccaggccggagtgcagtggtgatcatagctcactgtagcctcaacctcctgggcttaagctatcctcccgcttcagccttccaagcagctgagactaaaggtgcacaccaccacacccagctgattttattttattttttgtagatgtggcgtcttactatgctgcccaggctctggaactcctgggctcatgcgaacttcctgccttggcctcccagagcgctgagattacaagcaagcatgaaccactgtgcttggccccagtaaccacagtcttaaaagcagtagcagcagctaacatttattgagcacttactgtacacaagggctgttctgtcaacttgcctttattttattttattttattttttgagatggagtttcactctcgttgcccagactggagtgcagtggcagcagtctcagctcactgcaacctccacctccccggttcaagcgattctccggctgtagactcccgagtagctgggattacaggctaatttttgtatttttagtagagatggggtctcggccagactggtctcaaactcctgacctcatgtgatccacctgcctcggcctcccaaagtgctggggttacaggcatgaggcctctattttaattttcaaacagaccaccctgtaagggtggtaggtagtattttcatcacttccattttccagatggagaaactgaggcacagggcaactaaaccatttgcccaagttaacctggcttgtaagtggtagaggcgaaattcaaacccggagctctggagctttatcctgtctgcctccttttcaatcttcgcatgcccactttctccacgatgctgctttgcggtgaaagttactcacccaccattttacagatgaggaaattgaggcctagagggccaacgatgcttggggatgaaaagttttgatgcctgtaggttgcaaagcagggaatttccagactgggctcccccgactggccctggcaaatatggaagagactccaggctcaagaggggaagaaagtttcttccttatccctcaccggtctggtattggtacagtcagagggtaggggcatgttcagggaaggggtctagcgcctcctcgtggttataataatttaaaaagagggcccagcactttgggaggccgaggtgggcagatcacctgaggtcaggagttccagaccagcctgaccaacatggtgaaaccctgtctccactaaatacaaaattagctgggtgtggtggaatgcacctgtaatcccagctactggggaggctgaggaaggagaatcacttgaacctgggaggcggaggttgctgtgagcagattagctgtgtgtggtggcatgcacctgtaatcccggctactagggaggctgaggaaggagaatcacttgaacctgggaggcagaggttgctgtgggcagagattgcaccattgcactctagcctgggcaaccagagtgaaactttctcctaagaataataataacgataatttaaaaagaaactccatgatgagggccacgtattaggtggacgggggagggcctgcttacactctactggggtggaagctagggatgggggcagagagacctaatctcatgaagatgatttcagctaatgataaggtaatggccgggaagccagtaaatgtttgttgaatgagttaatgaaagacactattgggcctggcacagtggctcgtgcctgtaatcccagcactttgggaggctgaggcaggtggatcacttgaggccaggagtttgagaccagcctgggccacatggcgaaaccctgtctctactgaaaatacaaaaatttagccacgcatggtgacacctataatcccagctactcgggaggctgaggcaggagaatcacttgaatctgggaggcagaggttgcaatgagccgagattgcgccactacactccagcctggtccatagagcaagacaaaaaaaaaaaaaaaaaaagacactattgtagtctataaggagagggatgatggtggcttggatttgggtggtgaccatggacatggtgataaagggatggatttgggataaatgtcaggtgcagtcaatagagctttcaattatttattcattcaacaggtatttaaggggcatgcctatgtgtcaggtgctgcataagagaggggtcagtagtgaaccaaagaaacataaattcttgaacagacaataaagaaacaatgatgagcgggtgccatggcccacgtctgtaatcccagtactttgggaagccgaggtgggaggattgcttgaggccaggagttcaagaccagcctgggcaacatagtaaaagcccctctctgcaaaaaaatttaaaattagccaggcacagtggcacaagcctgtagttccagctacttgggaggctgaggcgggaggatcacttgagcccaggagtttgaggctgcagtgagctatgatcatgccactgaactccagcctggatgacagaagaaagagcctgggcacagtgactcaagcctgtaatcccagcactttggaagaccaaggcgggcagatcacttgaggtcaggagtttgagaccagcctggccaacatgctgaaaccctgtctctgtgaaaatacaaaaattacctgggcatggtggcaggtgccagtaatcccagctgcctgggaggctgaggtcagggaaaacctgggaggcagagcttgcagtgagctgagatcatgccactgcactccagcctgggtgacagaatgagaccctgtcaaaaaaaaaaaaaaaaaaaaaaaaaaaaagccgggcgcggtggctcacgcctgtaatcccagcactttgggaggctgaggcaggtggatcacctgaggtcaggagttcgagaccagcctgaccaacatggagaaaccctgtctctactaaaaatacaaaattagctgggcgtggtgatgcatgcccgtaatctcagctacttgggaagctgagacaggagaatcgcttgaacccaggaggcagaggttgtggtgagctgatcacaccactgcactctagcctgggcaacgagagtgaaactccgtctcaaaagaaaaaaaaagaagaaagaagcctggcgcggtggctcacgcctgtaatcccagcactttgggaggctgaggcgggcggatcatgagatcgggagatcgagaccacgatgaaaccctgtctctactaaaaatacaaaaaattagccagacgcggtggcggacgcctgtagtcccagctactcaggaggctgaggcaggagaatggcgtgaacccgggaagcggagcttgcagtgaactgagattgcgccaccgcactccagcctgggtgacagagtgagactccgtctcaaaaaaaaaaaaagaagaaagaaacaaagagagaaagaaaggaaagaaagaaaggaaggaaggaaggaaggaaggaaggaaggaagaaaggaagggagggaaagagggagagaaaggaaggaaggaaaaaaataacttaaaaaatcagatttgttggacaaagatcagggcttaacctagggaggtgggtagagctaatggaatgcggaaaaggctgtgatttgaaatgaggggatttaggaagacctcatgagaaggtagcatttgagcaaagacatgtaggggtgagggagctagccatgaagttgcttaaggtggaggacacagcccgtgcaaaggccctggggcagggccgtatgttcctggcatgttggaggaagagcgaagaggcccgtgtggctggagcacagtgaagagggggagagagggagtggggagggcagggagggaactgggcaattcaagcagggttttgtgggccttggggaggacttgggcttgtccctggaggaaagtgggagccatagagagttgtgggcagaagaagggtgtgccctgactcagatgctcacaggcaacctctggtggtggctgcagggaggacagactgtggggtacgggggctggagtcagaagaccagctgagtgatgacggggctggaccagacagaggagggggtgagaagtgggtgaattctgggtatatttcagagtgtcactgccgccgtctgcatatggaggaagctcacccatctcatagtctagctggcctgactcccccagccccccaactccccatgcccaggcctgtgtcgagtgggcggaagaaagagatgtcagattctgcatggaaggcgtggggtggggctgggctgcaggtgctcccccagctcccccccgccccatggctcctcctcctccaccccctctcagggcgacagttacaggcaaagaagaggaagtggtagcactagctgtcgctccacaggcgagcagggcaggcgtgcgggcgggtgggtggtggaggctgcgagggtgcacggccggccctgggcaggcggtagccatggagctgtggcgccaatgcacccactggctcatccagtgccgggtgctgccgcccagccaccgcgtgacctgggatggggctcaggtgtgtgaactggcccaggccctccgggatggtgtccttctgtgtcagctgcttaacaacctgctaccccatgccatcaacctgcgtgaggtcaacctgcgcccccagatgtcccaggtgagccctccgcgggcaggtgtgctgagggttggagacgggggtcctccccggggctgacagtcgaggggctgacgtgctgctccacctctgggcctgcaaaggagagggaatatgcttacaggtccagggctggcccagggggtggtcacaatctgagattctggggtggcctccccaagcttaacaggctccctgtgtgggttcacgggccctgagttggcccgcatctgggctgagaactggcaaactaggggttaactctctcaagccccaggcgcctctactgtggttcatgcccccagatgggaccaaccagaggtctcgggggagctccccagaacccccagggtggccattgggttacctgaggctttggactcctttgacccccagagtctggatgtgggggaggagcctccgccaacatcttcccccacatgtgtctcctcctcccgggccctgggccccttccttccccttacatcttccttccccttggcttcctgcctgggcctggggcagcatggggcaggtggggggctgcagccccagggatctgagcttcctccctgcatccatctcagaggagatagtaaggcagggcccagtcctgggctcagagagtgggtcctgaggtcttggtgcttggaagagctgcattttctcggcagggatttctgcaggggcccaggctggaggggtggtggtggatttgactgtggctgtatgagactggctcaggaaatatattcaaatccctatttgaatgtggttgggtgggcgtgtgatgtggctgcattatgttgctgtagcatcatgtctggttccccagggctgctgggtgggaacgggggacggggcggggctggtggagtcccatctcctctgggatgaaaggagatacagccctatcctggggcctgggggacacagtcctgccctgaggtctgaggggacagctcccatctggtcctcaggctggccctgcagatgaagagctgggaggataagttaatggagatgggcccatgggggttcctggcgggtggttttcaggggcagggccattggtggaagagatccatgcgcctttactccttctgtttattttatttatttatttatttttttgagacggagtctcactctgtcacgcaggctggagtgcaatggcaccatctcggctcattgcaagctccgcctcccaggttcacgtcattctcctgcctcagcctcccgagtagctgggactacaggcgcccgccaccacgcctggctaattttttgtatttttagtagagacaggggtttcaccgtgttagccaggatggtctcgatctcccgacctcatgatccgcccacctcggcctcccaaagtgctgggattacaggtgtgagccaccgcgcccagcctttttttttttttttttttttttttaaagacagggtctcactctgtcgcccaggctggaggcagtggtgcgatctcagctcactgcaaccttagcctctcaggatcaagcaattctcctgcctcagcctcctgagtagctgggattacaggcgcccaccaccacacctggctaatttttgtatttttagtagagacagggtttcactatgttggccaggctagtcttgaactcctgacctcaaatgatccacccacctcggccttccaaagtgctggaattacaggtgtgagccactgtgcccggctgctccttctgtttttttttatcttatcttttattttttgagatggagtcttgctctgttgcccaggctggaatgcggtggtgcaatcttggctcactgcaccctccacttcctgggttcaagtggttctcctgtcccagcctcccaagtagctgcgactacaggcacacatcaccatgcctgcctaattttttttttttttttgtatttttagtagagatggggttttcccatgttgaccaagctggccttgaactcctgacctcaggtgatctgaccacctcggcctctcgaaaggctgggattacaggcatgagccaccatgcccggcccttctgtttctttagtgccaggggattacactgtcctcagctgggacagggcttcctgaaaggagaaggcactccccccaccaacctaagcatccatcctctggccacagcccatcccagctttgcctacatttgcttaatcttctggtttctagggcatgaggaagtagtcatgggatctgttaggccccatctgttagacctggcagggagtcaagctctctgtgatgcttcaatagcagctaatgggaaagtggatagacttaaggatgaacttccattcttgtgtatgtcttagctaaagctagtttttggatgaaggacgagggtgcatgatgctaatccctgggagagcagctgcactccaaatacagtcctaatcctctgtaacagggaacaacgggaacccagatggggtcaggctttatgcaagaggggacatttgtgctggggttttgaagagtaaataggagtttttctcattgttctggcttcctgtgcccagctgtatcaggctccaggctgggcatcggtgtacccagaccctttccctcttcgagggggcacattcctgcccctacccattttgttgccctttgaagcccggccgtgtgtctggtatgtagtggggacgtgtgagggaaggtaagaggtcttgacaagaagccagaggaagctgccacaggaacaacctctctgggtttctgggtgcctaactgtccacagattgaagcagagctgtgaatgccccatgggatgtgaaagggtagagggaaaaaggaaaggtgctcctgtggaggaaatggcataaataaaggtgtgcaggctggaatgagaattcttcccagtttctgtcatttctcttcggagtccttctcttttttctcagttgtttcttgggaagagggtggaaagaacatattcatccatccgttcatccacccatccactcattcatccactcatctatccctccaattatccatccatctacccatccatccatccatttatccatccatccatccatccatccatccatccatccatccatccatctgctcatccattcatccatctgctcatctatccacccatccatccatccatccatccatccatccatccactcctccatccatctgctcatccatttatccatccactcatctatccatccatccatccatccatctgctcatccattcatctatccactcatccatccatccatccatccatccatccatccatccatctgctcatccattcatccatccactcatctatccatccatccatccatccatccatccatctacccatccacccacccatctatccatccatccatccatccatccatccatccatccatccacccacccatccacccacccatccatccatccattcatccattcatccatccactcatctatccatccatcctctcatccatccatccatccatccatccatccatccattcaaccacccactcattcacccactcatccgtccatccactcatccatccatccatccatccatccactcatttatccatctatcagtctatccatccatctacttttccatccatgtatccacccatccacccacccacccattcacctatccacccacccatctatccatggatccatccatccactaatctgtcttttttatttatttgtttatttatttacggcgtctcactctgtcacccaggctggagtgcaggggcatgatctcggctcactgcaacgtctgcttcctaggttcaagcaattctcctgcctcagcctcctgagtagctgggactacaggcacccgccaccacgcccggctaattttatatttttagtagagatggggtttcaccatattggccaggctggtcttgaactcctgaccttgtgatccactcgcctcagccttccaaagtgctgggattacaggtgtgagccatacgcccggcccatccattcatctatctatcatccacctgcccacccacccatccatccatctactcatccatccatccatccatccatccacccatcccatccatccatccactcatccacccgtctactcatctatccattcatctacccatccatccattcattcatccatccatttatctgtttaactatccatccatccatccatccatccatccatccatccatccatccatccatccagcaatgacaaggtctgccaggccctgttcttggtgctggggacagtgggaatagcacacacacacaaaaacccctgttgttgaggagcctgcattctagtgggggaggctgacagtgaagaaataagacaatgtataagtcatcaggaggtggtatgtactgctctggagaaaacaaagtggaacagggtatgaggggggcactttgacgaggagggctagtggtaaggtgacattgcagcagagacctggggaaaattaaggaatgaatcatgtggatctggggaaatggtgttccagacagtggttactgccagtgcaaaggccctgaggtaggagccagtcagtgcctgtatgttcagggcagtgactggcccagctggtgggaatggtgcaggaggtcaggttggatgaatctccaagcggctggtccccttgagatctgaggcccagggagagaatgataccatcatgagaagccacagctatactgagacacccaactctcaattatgaattttgttttttttaaatgagacagagccttgctgtctcccaggatggagtgcagtggcatggtcccaactcactgcagcctccacctcccaggttcaagcaattctcctgcagcagcctcctgagtatctgggattacaggcgcctgccaccacgcctggctaatttctgttgcccaggctggagtacagtggcatgatcttggctcactgcaacctcctcctcccgggttcaagcgattctcctgtctcagcctcctgagtagctggggctacagatgcgtgccaccatgcctggctaatttctgtatttttagtagagacagggtttcagcatgttggccaggctggtctcgaactcctgaccttaagtgacccacatgcctcggcctcccaaagtgttaggattgcaggcgttaagccaccacgcccagacaccactgtgctcttgaagtccaaaatctgggctgcggagatggaacttgaaggccaagagactggagaggaaagaacagatggttggaaagatccaccaggacatgggagctggttagacctaggatgtgggcagctgctggggccaagatgatgttaagttccccagccccagtgaatagtggggagagggtgggacagttagagtagggggtggactggggagtgggttgggtggtggctttggagagccacacctgggttcaaattctggtaccaccacttcctggtttcacctctctgagcttcagtttctccatctgtgaaacatagataaaaatggcaccttttaaggctgggcggtggctcacgcctgtggtcccagctacccgagaggctaagtggggaggatcacttaagcctgggctgcagtgagctgtgatggcaccactgcattccagcctgggcaacagagagagactttgtctcaaaaaacaaaacaaaacaaaacaaaacccaattttgcctgggtgtggtggctcgtgcctgtaatcccagcactttgggaggctgaggtgggagaattgcttgagttcaggaattcaaagcctggtaacatagtgagaccccgtctctactttttttttttttttcttaagagacagagttttgctctgtcagccaggctggagtgcagtggtatgatcacagctcactgcagcctcgaactcctgtactcaagcagtcctcctgcctcagcctcccgagtagctgggactacaggtgtgcaccggcatacctgggtgatttttttgtttgtctgtctgttttctgagacagggtctcaatctgtcacccaagctggagtatagtggtatgatcacagctcactgcagcctcgaactcctgtgctcaagcagtcctcctgcctcagcctcctgagtagctgggactacaggtgtgcaccagcaatacctggctaattttttattttttgtagagatggggttttgctatgatgcccaggctggtcttgaactcctggcctcaagcaattcctcccgccttggctttccaaagtgctgggattacaggcatgagccactgcacccggccagaatagaggttcttatctccatcctcccataacaggaaagatgacacatgccacccactgctctatgcttgctttcctcactaatcaccttggcagtctttccaagtcagtctgtagagattataattattctttataacatgactgcgtattccatttatttcaagaaagacttacattttgctcgccctgtgctagacattagtctaaaccagggaggggcctggctggatgcagtggttcaggcctgtaatcccagcactttgggaggccgaggcgggaggattgcttgggtacaggagttagaggccagcctgggcaacagagtgtgacctcgtctctataaaaatgaaaaataaaactaaaataaagctgggggctgggtgcggtggctcatgcctataatcctagcactttggcttacaggtgtgagccaccgtgcctggcccaattatagcttctaaaaaataataaaaggccgggcacggtgactcacacctgtaattccagcactttgggaggccgaggcgggcggatcacaaggtcaggagatcgagaccatcctggctaacacggtgaaaccccgtctctactaaaaatacaaaaaattagccgggcgtggttgcgggcgcctgtagtcccagctactcgggaggctgaagcaggagaatggcatgaacctgggaggcggagcttgcagtgagccgagatcaggccactgcactccagcctgggcgacagagcaagactctgtcttaaaataataataataataataataataataataataataataataataacctcatccatgaatcattttccagctcctctgctgtgtgatcttgggcacattagtaaacctctctgtttcctggtttctcatctgtaaaatgaggatgctaaatccctatttacagcatcattgtgggggataagtgtattattataaagaacctagaaaagtgtttagctgcatatgcagttgtgtgttgcttaataaaaggaatctgttctgagaaatgcgtagttagatgatttcacagttgtgtgaacatcagagtacatttacataaacctagagggtacagcatactgcacacctgggctatatggtataacctattgctcctagctacaaacccgtacagcatgggactgcactgaatacttaccattgcattaaaagattgccttctccttttctttcttttttcttttttttttttttttgggacggagtctcactctattcctcaggctggagtgcaatgacgtgatctcagctcactggaacctccacctcctgggttcaagagattctcctgcctcagcctcccgagtagctgggattacaggcacgtgccaccacatccggctaatttttttgtatttttagtagagacagggtttcaccatgttgaccaggctggtcttgaactcctgacctcagatgatctgcccgcctcagcctcccaaagtgctgggattacacgtgatagccaccatgcccaggcgatttcttatcatttataccatattttatacaaagatttcttatctttcttttgagacagagtctcactctgtcacccaggctggagtgcattggcacgatctctgctcactgcaacctccacttcttgggttcaagtgatcctcctgcctcagcctcctgagcagctgggactacagatgcacaccaccaagcccaccattttttaaagtagagatgggggtctcaccatgttgcccaggctggtctcaaactcctggcctcaagagaccctcccacctcggcctcccaaagtgctgggatgataatcgtgaatcatcgtgctccacccagtcctcgtgtttttatttttcaaattttaagacgttttattttgtcaaccgaagtgctagccaatctttgtgtttttgatagatattgccaaattgttatccgtctgggattgtttccatatgaattatttcaattataccaccacatgccagaggactggcttctctgccgcctccccgacagacggttctgttgccaagattctggagttttgccagctggatgggaaatcagtggagctcattaaggctcagtttacattttctcttattctgagtgaagctgagcctctttccttatgtttaagagctatttatattttcttcctgtgatacaatctctgttcatatcacttgcttactattgttgcactttctagaactactgaccttttctcttactgattttttttttttttttgaggctgagtctttctctgttgtacaggctgcagtgtagtggcgcaatctcagctcactgcaacctccgcctcccaggttcaagtgattctcgtgcctcagcctcacaagtagctgagattacaggtgtgcgccaagatgcccagctaatttttgtatttttagtagagacagggtttcgccatgttggcctggccggtctcaaactcctgacctcgagtgatccacccgtcttggcctcccaaagtgctgggattacaggcatctcttactgatttttaggagctctttatatataggttgacttaaattgcaagtcaggtatttgctagctttgtggtcttggagaaaaaaataattacttaacctattggatccctgattgtcttatctataaaacaggaaatctataaaatgagaatgttggccgtgcacatggctcactcttgtaatcccagcacttcgggaggctgaggtgggggatcacctgaggtcaggagttcaagaccagcctgtccaacatggcgaaagcccaactctactacaaatacaataattagccgggtgtgctggtgggcacctgtaatcccagctactcaggagactgaggcagaagaatcccttgaacccaggaggcggaggttgtagtgagccaagattgcaccactgcactccagcctaggcaacagagtgagactccatctaaaataaataaataaataaataaataaaaataaaaataaaataaaataaaatggaaatgttgacagtacctttatttcagagttgtgtaaggattaaacatgataaggtaaatgaaattcccagcatggcaattaacatatagtgagtgctaaatgaacgagagtcattatttttgttaatttaattccattgagtcccagctgcctgtaggcaatggtatataagtcagggtacgtatgttaactgctgtaacaaattgcatcattttgccaggcacaatggctcacgcctataatcccaacactttgggaagccaaggcaaggctaatcgcttgaggccaggagtttgagactagcttgggcaacatacaagatccccatctctacaaaatatatatatatattagcagagcatggtggtgtgtgcctatggtcccggctacctaggacgctgaggcaggaggatcacttgagcccaggaattggaggctgcagtgagctatagatcgcgccgctgcagtccagcccgggtgacagagtgagatcctgtctcggaagaaaaaaaaaaaaggccaggtgcagtggctcacgcctgtaatcccagcaccttgggaggccaaggcaggtggatcatgaggtcaggagtttgaaaccagcctgaccaatatggggaaatccggtttctactaaaaatacataaattagccaggcgtggtggtgtatgcctgtagtcccagctactcaggaggctgaggcaggagaatggcttgaacctgggaggtggaggctacagtgagctgagatcatgccactgcactccagcctggtgacagagcgagactccgtctcaaaaaaaacaaaaacaaaaacaaacaaaaccaaaccctcaaaacacaaaaccaaattacatgacttcagtgatagtgagactttacttcttattgatgtcacaattcagtttgggtcaatgtcaggggttgggggaggagggctctatgttatagagtctctctagggccgaggctccatcatctcatggtcttagcttcccgaaggcccttggagtcttttctactggggaaagagcgctatgaaagaatttcccaggccaggcctggaagtggcgccatcacctccatcctttttttttttttttttttttgagacggagttttgcccttttcctccaggctggagtgcaatggcgcgatctctgttcagtgcatcacggcaacctccgcctcccaggttcaagtgattctcctgcctcagcctcccaagtagctgggattacaggcatgcaccatcacacctggctaattttgtaggggtttctccatgttagtcagggtggtctcgaactcctgacctcgggtgatccactcgcctcggcctcccaaagtgctgggattacaggcgtgagccaccatgccctgcctccattcttgttattggccagaacttggtcacatggctccatttaactacgagggagactaggaatgtggttaaactggagctggggataaaaaggagataggttggttggacgcaaagaagtcactgccgtagaacctcagggtaatgcctcactggctccagaaatgcaggtatggagcgggtttcaggaatgcaggtctagggccaggcatggtggctcatgcctgtaatctcagcactttgagaggccgagacaggaggattgcttgaggctaggaattcgagaccagcctgggcaacataccaaggtcccgtctctacaaaaaataaaaaaataagcccggcatggtggtgcacgcctatagtctcagctactcaggaagttgaggcaggaggatcgcttgagcccaggagtttgatgctgcagtgagctatgattgtgctaccactgtactccagactggacaaaagagtaagaccctgtctctaaatatatctatgcaggtctgtggaaatctcaatgggatgtagaataagaaggacctgagccaaggccatgggggaggaattcagctggggatgagggagctgggtgatagcaacttcagcaaaatgggttgggctgattggaaaacctcctcttaccttgcctgctagggccaacaggaggggcatctaggagggtcagcacttggcaccatccctttccattccattctgttccttttttttttttttttttgagacagagtttcactctctctcccaggctggagtgcagtggcacaatcttggctcacggcagcctccgcctcccgggttcaagcgattctcctgcctcagcctcctgagtagctgggattacaggcaagtgccaccacacctagctgatttttgtatttttagtagagacggggtttcaccatgttggccaagctggtctccaactcctggcctcaagtgatctacccgcctcggcctcccaaagtgctgggattacagacgtgagccaccatgcccagcctccattctattctattcactgacctcctctcttggtccagtgctgggaaatgtcacctttcaggactttcacagagatgctagaaatctctgtcccttccctactcacagcccttccctggttccccactgcccttggtgaaaaagacaaaatcctcactgtagcccacaagggcttatgcatttggcctctgtccatctctcagcccttccctgctccctctctacccattgctctctgcaccgcagccaaatcggccacccagcacaatccagcctcagggcctttgcactggctcttccttcttcagggatttctcttccctcaggtatacacggtgagtgttctcttatctccttcaggtttctctttctctctctctctgtcttttttcggagaagggggtcttgctctattgcccaggctggagtgcagtggtgttatcatagctcactgcagcctccaacttctgggctcaagtgatcctctcgcctctgcctcccaaagtgctcggatacagacatgagccacttcacctttttcttttttctttgttttaacggggtctctgtctattgtccaggctggagtgcagtgacatgatctcagctcactgcaacctctgcctcttggattcaagtgattctcctgcctcagcctcccaagtagctgggattacaggcatgtgccaccatgcctggctaatttctgtatttttagtagagacggagtttcaccatgttggccaggctggtctcaaactcctgacttcaggtgatctgcccgcctcagcctttcaaagtgctgggattactgatgtgagccactgcacatggtcagtggccaggtttctttctttctttctttcttttttttttttttttgagatagagtcttgctctatcgcccaggctggagtgcagtggcacgatctcagctcaccgcaacctctgcctcctgggcccaaatgattctcctgcctcagccttccgagtagccaggattatagggacgcaccaccacacccagctaatttttgtatttttagtagagatggggtttcaccatgttggccagctggtcttgaactcatgacttcaagtgatccgcccgtctcggcctcccaaagtgctgggattacaggtaatgagccaccgcgcccagcccagatttcttatctgagagatcttccactgtttctagatataaaatcatagatttcgccctcccaacttcccattctctttcatgttttatttttctccatagcacttagtgctctctgacctgtcatagtttttacttatttgcttattacctgttttccacactcaaatgtcaaggcaaggatttttgtctattttacgtcccccagtgctttagaacaccacctggcacatagtacggaatcaattaatttattcatttatcatatgaatatatgattctaattgcttcattcattcgcttaacacaggggctggcaaatgataactcatgggcccaagctgcctcgtgttttaaaaattatcttagcttgtatctgtagtcccagctacccgggaggctgagatgggaggatcgcttgagcccaggagtttgaggctgcagtgaactatgatcctgccactgcactccagcctgggcaacacagcaagcccgtccctgtaaaataaattaatttaaaaaattaaaaatgaaaattatggctgggtgcagtggctcacgcctgtaatcttaagacattgggaggctgaggcaggaggatcacttgagcccaaaagtttgagatcagcctgggcatcctggcaaaaccccatctctataaaaaatataaaaattacctgggtgtgatggtgtgcgcctatagtcccagctactcaagaggctgaggtggaaggatcacttcagcctgggagatggaggttgcagtgaaccacgattgcaccactgcactctagcctgagcaacagagacagggtctcaaaacaaaatgaaacaaaacaaaataaaaattattttatttatttacttttcttggtattgatttgacgtttactatttttatattttattattattatttttggtattccgcatattcagaaaaacttctctagtaacaatctatataaaaatgatccctgaaagtagagtcttactgccttattttgaaaataaaatttaaccaatacacggtcaggcccatttgttgacacgctgtctatttttttttttttttgagatggagtcttgctctgtcatccaggctggagtgcagtggccttcaggtctggctggatccaggggctcaggcaatatctcaggacacctcctccccacccttggtctttccatctctctctctctattttttgtttgtttgcttttttgtgttttgagacagggtctcactctgtcaccaaggctggagtgcagtggtgcgatcttggctcactgcaacctccatctcttggcctccagtgatcttcccacctcagcctcctgagtagttgggactacaggtgcacaccacaatgccaggctaatttttgtatttttagtagagatggggtttcaccaagttggcaaggctggtcttgaactcctgacctcaagcaatcttccccgccttggcctccaaaaatgctgggattgcaggcgtgagtcaccgcacccagccctccatctcttaactctgctttcttgtgggtgttttcctccatcctcaatcattcttttccctcatggaggcagatgagggtgaccaactactccagatttatttatttatttatttatttatttatttatttatttaaagtctaagttttgctctgtcacacaggctggagtgcaatggcatagtcatagctccctgcagcctcaaacttctgggctcaggagattctcctacctcagcttcccaagtagttgggactaataggtgtgcgtcaccatgcccaactgtttttttaatgttttaaaaacattaaaacacagccagacatggtggctcacacctgtaatcccagcactttgggaggccgaggcaggtggatcacgaggtcaggagatcgagaccatcctggctaacacggtgaaaccccgtctctactaaaaaatacaaaaaattagccgggtgtggtgacgggcacctgtagtcccagctacttgggaggctgaggcaggagaatggcgtgaacctgggaggtggagctggcagtgagccgagatcccgccactgcactccagcctgggtgacagagcaagactccgtctcaaaaacaaacaaacaaacaaaaaaacattaaaacattcaatggagatggacctcactgtgttgctcaggctgatatggaacttctggcctcaaatgatccttctgcctcagcctcccaaagctcttagattacaggaatgagccaccacatccagcctgctctaaatttatattctcatcactctgagttcgatggaaaataggggggttggctttctggtcactgaagccaaggtcctagcattatccttcgttgaacatgattctttttattttattattattattattattattattattattattattttgagactgagtcttgctctgttgcccaggctggagtgcagtggcacaatctcggctcagtgcaacctccacctcctgggttcaagtaattcttgtgcctcagcctccctagtagctgggattacagacaggtaggtgccaccacacctggctaatttttgtatttttagtagagacggggtttcaccagattggccaggctggtcttgaatgacctcacgtgatctgcccacctcggcctccccaagtgctgggattacaggtgtgagccactgcacctggctgtttgaacatgattctttttttgtggaggtgggaggtggctggtcacatgtctatttctgaaccggctgctgtggccaggagaataccatgctctgatgggccaggccagggtcatgtgcctattccttgagttgaggttggggtggcttccacagaggaaactgaggaactgttacctcagaagggtaaataagatgtcaggaggcaatcagtgtttatatgggcagtgacttctaaatttaagccagaatttctgattctcagtcctgttgacatgtggggccggatcattttctgtcctgggagctgccctgtgtattctaaaatgcttagcagtatgcttggactctatccatttcacacaagtagcacctctcctcagtatctccagacattgccaaatgtcccctgggaggcagaatcgccctgggggcgggcaaaccagttttggagggagtgagcttgctgtcttggggaaaatccaaagagatctgatgattactggctgagaacagcaaagaagagattgagggcttctttgaattagaatatttattttaatttctttctttctctctcctttcttcttttttttttttgacagagtctcactctgtcgcccaggctggagtgcagtggcgcgatctcgtctcactgcaagctccacctcccaggttcacgccattctcctgcctcagcctcccgagtagctgggactataggtgcccaccaccatgcccagctaattttttatattttcgtagagatggggtttcaccgtgttagccaggatggtctcaatttcctgacttcatgatccacctgccttggcctcccaaagtgctgggatttcaggcatgagccaccgcacccggctctttcctttcttttctgttctgctttcttttcttttctttccctccttccttccttccttcctttctgatggagtctctctctgtcactcagactggactacagtggtgtgatcttggctcactgcaacctccgcatcatgggttcgagtgattctcctgccttggcctccagagtggctgggtttataggcatgtgccaccatatccggctaatttttgtattttttagtagagaaggggttttgccatcttggccaggctggtctggaactcctgacctcaagtgacctgcctgccttggcctcccaaagtgctggattacaggcatgagccactgcacctggccttattttttatttaatgatggggagaggccagacgtggtggctcatgcctgtaatctcagcaccttgggatgctgaggcgggtggatctccaacatggtgaaaccccatctctactaaaaatacaaaaaaattagccggccatggtggcaggcgcctgtaatcccagctactcgagaggctgaggcagaagaatcacttaagcccaggaggtggaggttgcagtgagctgagatcgtgcaagtgcactccagcctgggtgagagagtgagactctgtctcaaaaataaaataaaataaaataaatgctggggagaggaagaggggaggaagactcatttgatgttattttatcatcagtgataagggctacactgattgctggggttacagcacaggacataatggacacagttaatacttttctgagttcatgccctcttgagggagggggtggtgtttttgttccttgtggcttttgtaacaaagaaccacggatcggatgtcttagaacaaaggacatttattctctcataatcctagaggccagaggtctgaactcaaggtgtctgcagagctgtgctccctctgggggctccaaaggagaatctttctctgcctattcctgcttctgggggctccagatgatccaggacaggcgagcccctagattggggcttagccctggagggttcttggcttcacccaggaaagaattcaagggcaagctggtggtgttagcaagttttattgaagcaaccatgcagagcagcagcagaggtactgttccttgcagagcagggctaccccattggcagtgagcccagagtagcagctcagaggcagtgctgcaggcatatttatcccgttttaattatatgcaaatcaaggggtggattatgcagagatttctagaaataaagtggtaacttctgagttgtcaggtctttgccatggaagggggcatcagcttctgggtgttgccatggcaatggtaaactgacatagcactggtggccatgttttatggagaggcacttttgcctcttccctgtttcagctagtcctcaatctggtccagtgtctgagccccacctccagagtcgagtcctgcctcctatttcacatgcatccttggattgtgactccatctttacatggttttctcctatgtctgtctgtgtgtctcttacaaggacacttgttattggatttagggcccacctggatgatcccagatggcctgggtgggtcttaaatatctcctcatcttgaagtccttgagatacctcctcatcttgaagtccttgagttatctcctcatcttgaggtccttgagatatctcctcatctcgaggtcctcaagctatctcttcatcttgaggtccttgagatacctcctcatcttaaggtccttgagttatttcctcatctcgaggtccttgagataactcctcattttgaggtccttgagatacttcctcatcttgaggtccttgagctagctcctcatctcgaggtccttgagctatctcatctcaaggtccttgagctagctccttatcctggggtccttgagctacctcctcgtctcaaggtccttgagatatctcctcattttgaggtccttgagctatgtcctcatctcaaggtccctgagacatcgccccatctcaagatccttaccttacatcttacaaagtcgttttctccaaaaaatgttcacaggtcaccttcacagcttccagggatttgacctggatacatctttagagggggccagacccattccagacagtaaacaaatagacaaaacgctggcacattgtaataaatgtcacagatgaaacaaacccagggatcaaggggaagaagaagaggagggcatgctttctggagggtggtcaaggaaagctgagagctgcaggaggaggagccagctctgggaagcatgaggcagagagggcaaagactgtgcaaatgccctaaggtgagaagaatcagaatgaaggagcttctggaaggaagggagtgagtggagggagagtggtaaagaatgaggtttgggaggaaggtacttacctagaatggctatggggatgtgtgtggaacttaagggggggatgggaaatccttggagcatttaagcagatcaattgtttaaagaggtccctgaccaggtgtggtggctcatgcctgcaatcccagtgttttgggaggttgaggcaggaagatcacttgaggccaagggtttgaaaccatcctgggcaacatagtgagatcccacctctacaaaaaacaaaaaaagaagagagatctggaaaaagaaggttgatgaaggcatccccatgagaagtgatggtggcctcgactgggagttgggagtcatggatccagctcacattttcattgaggaggaagggtggaggtggatgaaaagaggaggcaggtctcatattccaggaaggcaagaattaaaaaaaaaaaggaatgaaatgaaatgaaaagaggaggcagggtggtgtctaggtttacagcttagggacttgcgtgaattagggtatcttctactgtagtaggaagactaggggaggaacaggtcttggggagtttgatcaagcaagggaaggaaggcagtacagcataatggctagcacatggttcttttttctgttttgttttgttttgtttgtttttgtagagacagggtctcactatgttgcccaggctgctcttgacatcctgggctcaggtgatcctcccatcccagcctcagtgctgggattacagggcatgagctaccatgcatgtccggtgcatggttcttaactaaggggtggtgtggggcagcagtgggggcgaggggagtgactctgtcctcccaggggacatttggcaatgcctggagacagtttcagttatcactactggagggcttggtgtgttattgatatctattggatagaggccagagatgcttctgagtgtcttccaatgcccaggacaggcccctctcccaccaaatgtcaacagcgctgagaccgagggactcagtgctaggcacatggactccagttgtgtggggggtccaggttccagtcacagctgtgggatcttgggcaagttatcaaatgcttcaagaaaggaccatatatatggccgggcgcggtggctcacacctgtaatcccagcactttgggaggccgaggcaggtggatcacaaggtcaggagatcaagaccatcctggctaacacggtgaaacctcatctctactaaaaatacaaaaaattagccaggcatggtggcgggtgcctgtagtcccagctactccggaggctgaggcaggagaatggtgcgaacctgggaggcggagcttgcagtgagccgagatcgcgccactgcactccagcctgggtgacagagcgagactccatctcaaaaagaaagaaagaaagaaagaaaggaccatatatcaaaaatgaccccaaaagcagagggagccaagacaccaaagaatgcagcagacaaatcctgtttgttggtaaagggtgatttgttgggggagcttatggagagaagaaacatggtcttgggcggcggcaagacaggtacctctctgcaccattacctcacagacccagtgcttatatagtacaggaaaatgtgcaggacccagtgcttatatagtacaggaaaaggcagtcctccagaacaggcaaaaacaccgtgcacatcacagcctataatttgtatgataacatcaagtttgctttgatatgttcttacactagggacagcaaataatgtagaactcaggagacattcccgggagtggggttaatcagaagtcaacatggcaattagcatccaagatggggccactttgtcttcacacagaacctctctgtgactcagtttccctatctttcaaatggagataaaactagtccctaccttataggattgttgtaagaattaaaaatgaggtaataattgtaaagtcgtaaagtgcttcaagcagtatccattaaatgattgataaataaatcattggtaaatgatttaccagtgatactgataaatgacttctttatcatttatgaaaaattgataaatgatttatttaccaataaaccaacggtaaatgatttatttaccaataaaccaacggtaaatgatttatttaccaataaaccaacggtaaatgatttatttaccaataaatcaacggtaaatgatttatttaccaagggtaaatgtcactcattgataaatgacttattggtaataaatcaattattagtttattggtttattggtaataaatcatttatcaatgagtgaaatcatttgggacaaagaagagagagggaaaagaggtggtctgagggttgggccttaggttgtaacagcatagaaacattggggagaggagaatacagtgactgaagaggaaaaccaggccaggcgtggtggcccatgcctgtaatttcagcattctgggaggctgaggcaggaggattgcttgagcccaggagtttgaggctgcagtgagctatgattgcatcactgcgctcaggcctgggcgacacaatgagattctgtctcaaaacaaaacaaaaaaacaaagaggataaccagatgggtgtggtgtcaagagaccaatgccgttgagaggagtagattcagaaagtgtcatgaatagcaacaaaagcaataggtcactttaatgagcacccactatgttcaggtgttgttctaggtactttatacttattaacacttttgaattttcacaacaaatccatggtgttggcaccatcatatatttaggttattagttattgctgtgaaacaaaccactccaaactgagtgatgtaagaaaaacatgatttttgattctcacagattctatgactcaggaattcagacagggcatagtgatgatggtgcctcagctccatggtgagaaactttgactttctgggaactagaatgctctggaggattcttcgtcacatgatgggtgtctgggctgggatgacttgaggctatgctcagttggggctattgactggagcacttacgtgtggtatctccaagtggcttgggcttccccacaacatggcgaccgggtttcaagaaacccggagagagagcaagtattcctcaaaaagatcaagccagaagctgcaaggcgtcttctaacctacttggaaatcacgcagtgtcacttacagcagttttcgtaacaagaagccataccctggcttctctcttcctaccctaggcaccagcagggacctccaattggctgaacctatctaggagcagggtgcaaaggagcctgggaaatgtagttgtcttcctggcagcgcaaaacaaaggaaggggatgagtcattaaccaatcaggttaatgacctacatgaaccttgagcaaatgaccctccttctctgaactctgtgtatcgctcgcgaaataggagccctacttcattgcaggatcgttttgaagaccagaggagacagttgtaatgcacacgaattgcttcacccagggcgtagttcttttatttatttatttatttatttattgaattaattttatttataactctaatgggtaagcagcctggttctcaattgatgggagctgtcaatattgctattggtctgagaactgatgatacgtaacggtttactatgtcctggcacagggtggcacgtcttagctctactggtcctgctggttttggggtttagtccactctttttgcttgtttgtttgtttgtttgttttttgagatggagtctcactctgtcgcccaggctggagtgcagtggtgcgatctcagctcactgcaacctccgcctcctgggttcaagtgattctcctgtctcagcctcccgagcagctgggactacaggcgcgtgccaccgcgcccagctaatttttgttatttttagtagagacagggtttcaccatattggccaggctggtctcaaactcctgacctcgtgatccgcccgtctcagcctcccaaagtgctgggattccaggggtgagccaccgcacccggctagtccactctgagatcaagcctagatatcctttcttgtgaccgtctctgccatgagctaccaggacatgacgaatctgccttccttcttgctgcctgttagagatataccctggtgatctaatcacctcttaaaggtcccgcttctcaacaccattgcattggggattatacgttcccaacatgtgcacattcaaaccatagcagcgtttaagcactccaaggatatgggtctactgccttcagcctgacttgctattgagtgtgtactcgagagagaggtgggagaaatacttcaaaggcttcaaaatcatttatttgtccttctttatagggaccccgggagatatggcagaatatggggtgcttggggtgacagccacttgctgcattttgattacatggccacggtttgggcatatcggcacctgagaccacccttggttcactcccttcctccctccccctcgcttactctgctccaggcacacagatctcctggctccaacatgccagggcctcagggcctttgcactggctgttccctctgcctgaaatgcttttttctcagagcctttgcactaacctcagggcttcttgtactaacctcactggctattccctctgcctgaaatgcttttcctccagacacccacctggattgtcccctcacctccttcaaacctttactgaaatgccactctctcaatgaggcttcctggacttccctatttaaaattgcaccccctcctgacattctccattccttttcctacttatttttttctcgcttaacacttaccaccttcagacaagctatgtaatatactcctacaataccttcattgtcttcctttgccagaatatcagccccttgagggcagagatgcttatctctttggttcatagctgtatctccagcacctagaccagtactgggtgtatagtaggtgctcaataaatatttgcatatttggccaggcacggtggctcacatctgtaattccagcactttgggaggccgagacgggtggatcacttgaggtcaggagaccagcccagccaacgtgacaaaaccctgtctccactaaaaatacaaaaattagccaggcatggtggcaggtgcctataatcccagctgctcaggaggctgaggcaggagaatcacttgaactcaagaggcggagattgctgtgagccgagattgcagcactgcactccagactgggtgacagagtgagactcagtatcaaaaaaaaaaaaaaaaaaattgcatagtgaatgaaggagtgtctgaatgatcaaagccctctcacctgctactccctttgcttggagcctttttacccccttcacactctaaagtaagaatagtttgaattacaaagaatacaaatttatctctcattcactatgttttatcaagagtaggagcaaaatggccgggcacagtggctcatgcctgtaatcccagcattttgggaggccaaggcgggcggatcatctgaggttgggagttcgagactcagcctcaccagtatagtaaaacccagtctctactaaaactgcaaaattagctgggcgtggtgacgcatgcctgtaatcccagctactcaggaggctgaggcaggagaattgtttgaaccccgggggcagaggttgttgtgagccgagatcgtgccattgcactccagcctgggcaacaagagtgaaagatcgcgccattgcactccagcctgggcaacaagagtgaaactccgtctaaaaaaaaaaaaaaaaaaagagtaggagcaaaaatatgactaagactgtattttgcattattgaccaatgatggtttacattatttccttattttccaccccatcctcccccacccactccctaagctgatagtcatcctatgcacctagttttaggggaaagacacagcagggcagccagtatcctgctgacttaaaaaaaaaaaaaccagctatattgacatacagtaaattacatatttaaaatacattggtggggcgcggtggctcacgctgtaatcccagcactttgggaggccgaggtgggcaaatcacttgaggccaggagttcaagaccagcctagccaacatggtgagaccctgtctgtactaaaaatacagaaattagccaggcatggtggcacgcacctataatcccagctactcaggaggtggaggcaggagaatcgcttgaacctgggaggcggaggttgcagtgagcggagatcgcatcattgcactccagcctgggcaacagagtgagactctgtctcaaaaaaaaatatatgatttggtaaacaattttttctttaatttctagatttgttttcagaaacggtcttggcagggcatggtgcctgaagcctgtaatctcgcccctttgggaagctggtgtgggaggattgcttgagtttaggagatcgagatcagcctgggcaacatggtgagaccagcctcatctctaataaataataaataaataaataaataaataaaataattagctggtcatagtggcatgtgcctgtagtcccagctacttgggaggctgagatgggaggatcatttgaacccaggaagtcgaggctgcagtgagccaggattgcaccactgcactccagtctgggtgacagagtgagaccctgtttctccccttcccccccccacccaaaagaagggggaaaaaagaaagaatcagggtctccctatgttgcccagactggccttgaactcctggactcaagcgatcctcctaccctagcctcctgagtagctgggattacaggtgtgtgccactgaacctggcctgatttgataaattttgacatatgtgtgcaactatgaacccagccttgaaatcaatggatcatatccattgcccctcaaagtttcctccatcccacccctccctgcctccccctcctcccacctctcattccctcgtacctcctgatttgctgttagtcactgtcgattagtttgtatttcctggagttttatgtaagtggaatggtaccatctgtggtcttctgtgactggctgctttccctgagcatgatgtcctggttcatccatgttgttgtatgtatcagtgtaccattctgttgtacggatgcaccccagtttgtttatccattcatcccttgatggaggtttttttgtttgtttcgctttgtttttttgagatggagtctcgctctgtcgcccaggctggagtgcagtggcgcaatctcggctcactgcaacctccgcctcccaggttcaagcgattcttctgcctcagcctctcgaacagctgggactacaggtgtgcgccaccacgcctggctaatttttttgtatttttagtaaagacagggtttcaccatgttgaccaggctggtctcgaactcctgacctcataatctgcccacctcggcctcccaaagtgctgggattacaggcgtgagccaccatgcccggcctatactttaagttctgggatacatgtgcagaacgtgcaggtttgttacataggtatacacgtgccatggtggtttgctgcatccatcaacccatcatctacattaggtatttctccgaatgctatccctctcctaacccccagcccccgacaggccccagtgtgtgatgttccccttggttgaggtttgaattactgatggcacttttggctatcatgaatcaagttgctagctggatatggtggcacatgcctgtagtcctaactctttggaaggctgaggcaggaggattgcttgagcccaggaatttgagactgcagtgagctgtgattgggccaggctgcactccagcctgggtgacagactgagactgtctcaaaaaaaaaaaaaaaaaaaaaaggaaagaaaagaaaacagaatcaagctgctatgaacattctgtacaagtctttgtatggacatgtgctttcatttctcttgagtaaatgcctggtaatggaatatatcgtatgataggtgcatgcttaatgttttaagaaaacttaccaggccagtcacggcggctcatgcctgtcattccagcactttggggaactgaggcgggaggattgctggagcctaggagtttgagaccaacctgaccgacatagtgaggctctgtttcttaatttttttttttaataagaagaaaatgtaccaacttttcttcctttgtgctggaattgcaaggtaaaaaaataatagtaataacaaggaaaacgtaccaacttttccaaagtggatctgccatgtgatgttcctgccagctgctcagcatgcttctcttctttgcttcactatctgtctcattttttttttttgagatggggtcttgctctgttgcccaggctggagtgcagtggcatgatctcggctcactgcaacctctgcctcctgggttcaagcgattctccttcctctgctttccaagtagctgggactacaggcgtgttccaccacacccagctaattttgtatttttagcagagacaggtttcactatatgttggccaggcgcgtctcaaactcctgacctcaagtgatcaacccacctcagcgtcccaaagtgctgggattacaggcatgagccaccacacccagcttcttttttttgttttgttttgttttttgtttttttgagacatcctcggtctgttgcccaggctgtgcagtggcgtgatctcggctcactgccacctccgcctcctgggttcaagcgattctcctgcctcagcctccagagtagctgggattacaggcgcctgtcaccacgcctggcaaatttttgtgtgtgtgtgtgtgtgcagtcggggtttcaccatgttgcccaggctggtcttgaacccctgacctcaagtgatccgcccgcctcagcctcccaaagtgctgggattacaggcgtgagccaccgcacccagccgctcaccatctctttgtcgcctgcatggcaccattctctcctgtaccaccccaaagccttaccaggtgcctcctgcatttaaccaggtcccatagctctctgtgcttcccggcacaccctctcaccaccctcatcatcaattattcaccttgctgactgcttagtgtttgtctcctggctggattacataagccctgtaagggcagagctctgtttgtcttgatcaccattaggttctggtgcttggcatacagtaggcattccacacatgcttgctgaattaatgcatgaccgggtctggggtgctgggtttcacaccaggctctaccgcaaacattgggtcaagtattttcattcccgacgtacagatgagtcaattgaatcaacggaaagcaaaatgatcccatccaagctccctcaacttgccgggctggtctgggagtcgaaccagatctgcctgaccctcccaccggtgctgaaaagtggagtgtgtgctggggtggtaggggatggggcagaagagagacgggcttcctcacagaagggtttgagggctaggatgaggcgtgcacactctgcacccctgcttcggagctttgaaagggtgcacagcacacccgccctctctgggaaccctcgggagcttgaggttgcctgatgaaggggctgatgggttgaacgcaaagggcccctccacccacccttttttctatctccccaaccaagccctggtaacaggcatttccggtttccggccggctccctggtgctggggtgggggtggggagttgattgctgccgtcgtgcttggctctgggtccccttctcccagaccccagaggcctctgtccctgcacactgcttccccgaaggagcgtggaaagccagccgacctttctggctctttcttcatcttgggcaggggttttgttgatgggaggctggctggcaaatggggaagaatgaacctcagggttcaccgcagtgcgcctgggtgctgatttgcatatgggcacgatgccagcacagtgggtgcccgcctcttcctggaggaaggaagaggggcactgaggggggttgcccccagcagggaggaaccgtcctcataatgcctctcctacgtttgtttaaaggaccatcattctcagcaaactatagcaaggacaaaaaaccaaacaccgcatgttctcacttataggtgggaattgaacaatgagaacacatgggcacaggaaggggaacatcacacacaggggactgttgtggggtcggggaagtggggagggataacattaggagatatacctaatgctaaatgaggagttaatgggtgcagcacaccaacatgacacatgtatacatatgtaacaaacctgcacgttgtgcacatgtaccctaaaatttaaagtataataataataaaattaaaaaaaataaaggacctcctgtcctttgccactttctcacactcttcaggcgaccaggaagtcctttctggtggtctaactgcagtcactgctgctgtctgatggagcccctttctttagctggccccaccgcagcccggagaggggatgaatcatgccccctttcccctctttgaggcatcacatgactggaaggaagctgtctccgggttcagctgatctccctgaggtcaggagggaacttcctccctcgagccacagacacagccatctgctctattgtctctggtgatctgcctgcccatgagcgccctcattatgccactctctaagaggcaccaggagcagcttagtgtggttcaaagaggcagtgttgtacagaggttagaggcacagactttgggatccagtgctggtatctggttctccattcctatctgtgtggtccgggatgggcagtatcccctctctgagcctcagttgtttcctctgtcaaagggagatttattcattcgacagattttattgagcatctactatgtgtcagacatggtactaggtattgaggtcctctatttacccaaaggagttgaacatttatgtccacacaaaaacttacactcaagtctttgtagcggctttattcatgattgctgaaactgggaggcaacaaattgtccttcggtagatgaatgcgatgtagggcaaggcaagccctaaattggggctcagcctgggacggttctttgttttgcccaggaaagaattccagggcgagctggaggtgttagacagtagcttttactgaagtgaaagtgcatagcggcagttgcagaagtcctgctcctcgcagagcagggctaccccacaggctgtgagcccggagtaatcagggttgcagtcatctttgtacccactttaattatatgcaaattaaagggcagattatgcaaatttctaggaaaagggtggtaacttctgggttgtcgggtcattgccttgggaaaggagtagtagctgctggtgttaccatcacaatggcaaactgccatggcacactggtgggcatgtcttatggaaaggtgcttctgctccagccctgttttagctagtcctcaatttggtccgttgtctgagccccacctccagagtcaagttccacctacttcctcgtatggataaataagctgtggtgcatccagacaatggaatattattattattattagagatggacttttgcccttgttgtccaggctagagtgcaatggtgtggtctcggctcactgcaacctctgcttcccaggtccaagctgttctcctgcctcagcctcctgagtagctgggtttactggcacctgccaccacacctggctaatttttgtatttttagtagagatgggatttcaccatgttggccaggctggcctcaaactcctgacctcaggtgatccagccacgtcggcctcccaaagtgctgagattacaggtgtgagccactgctcccagcgcagacaatggaatattattcagcactgaagagagatgagatgagctctcaagccatgaagagacacgcaggaaccccaaatgcatattactaagtgaaagaagccagtcccaaaaggctacatactatatgataccagctatgtgatgtttcagaaaaggcaaaactgtagaagcagtaaaaagatcagtagttgtcagaggttagtggaaagggggtatggataggcagagcatggaagctttccacggcagtgaaaatactctctatgacactataatagtggatacccatcatcatacatgtgtccaaatccagagaatgtgacgcacggcaggcaagccccaaagtggggcttagcctgtgaggcttcttggtttcacccaagaagcctcacaggctaaggaaagaattcaagggtgattccagtggtagggtagacgaaaacagctttattgccgtggcagtgttacagctccatgactgctcttgcagggctaccccacaggctgagagtagcagctcagggcagtttggcggtcctatttatatttatttatttatttatttagagacagagtcttgctctgtcgcccaggctggagtgcagtagtgcaatctcagctcattgcaacctctgcctcccaggttcaagcaattctcctgcctcacccttctgagtagctgggattacaggcgcgtgccaccacgcctgactaacttttgtatttttagtagagatgaggtttcgccatgttggccaggctggtctcaaatttccgacctcaggtgttctgcctgccttggcctcccaaagtgctgggattacaggcatgaaccactgtgcccttcccatacctccttttttttttttttttgagacggagtcttgctctgtcgcacaggctggagtgcagtggcgcaatcttggctcactgcaagctctgcctcccacgttcacgccattctcctgcttcagcctcccaagtagctgggactacaggcgcccgccaccatgcccggctaattttttgtatttttagtagagatgagttttcaccatgttagccaggatggtctcgattgcctgaccttcctgaggcgtgaaccacccgcctcagcctccctaagtgctgggattacaggtgtgagccaccgccccccggcccatacctccttttaattacatgtagagtaaggggcagtttatgcagaaatttccagggaaggggtagtaacttttgggtgatcaggtaattgccatgaaaagcggtggtaaggccgggcgcagcggttcatgcctgtaatcccagcactttgggaggccgaggcggatggatcacctacagtcaggagttcgagaccagcctggccaacatggtgaaaccccgtctctactaaaaatacaaaaattagctgggtatggtggcacacacctgtgatcccagctactcaggaggctgaggcaggagcatcgcttgaacccgggaggtggaggttgcagcgagttgagatcataatactgcactctagcctgggccacagagcaagactccatctcaaacaaaacaaaacaaaacaaaaacaaagaaaatagaccagttgtggtggctcacatctgtaatcccaggaccttaggaggctgaggcaggaggatcacttgagcccaggggttcgagaccagcctgggcaacatagtgagaccctcatttctacagatacacacacacacacacacacacacacacacatacacgcacacacacatgagttggggggatggtttcaggatgaatcaaccacattacatttattgttcactttatttctattattattacattgtaatatataatgaaataattatacagctcacacatatgtgtatatatatatgcacacacactatatgaatattatatatagtaatatttattcatttatatgaataaaaaagaaactaaaagagaggaggaaaggaaggaaggaagaaggaaggaaggaagatcagcctggagtctctggactgccctgatggaagtgtcttggatgctaaaggggtttatgggctgattccctcaacttcctcccgtctaacaaggtctggtgttccatcaaggcagtggctatgctcccaagaagtttgcaaatgacagaaaacctaattacaggtcaacaaaccatgacctgtgggccaaatgcagcctgccacctgtttttgtaaatgaagctcttttttttgagatggagtctcactctgtcacccagcctggagtacagtggcacgatctcggctcactgcaacctccgccacccgggttcaagcaattctcctgcttcagcctcccgagtagctgggattacaggtgcattccaccacgcccagctaatttttgtatttttagtagaaacggggtttcaccatgttggtctggctggtctcgaactcctgaccttgtgattcacccgccatgggctcccaaagtgctgggattccaggcgtgagccaccatgcacggccaacaattttttttaatgaaaataattttttctcaatgccgttttggaagagaagcaaactcgtatgtgggttttaagtatggcttcattcagtagctccaacaatgtcatcaaggactgcatgtctctgtgatggattccttttctggctttgtaaatctaggatctcccactcatggcagcaaagtagctgcagttgctccagaccgcctaacctcactcttgaccaacacagcggagagtaaatcactgtcccagaagctggagcttaagatccgggatttgcactctctcattggtctgaagtgggtcatgtgttaatctctgaaccaatagtcataggcaaggggatgggccatgctaattgactggaactgggggtggagcccctctcagcccatgttgctagaagagaaagaggaaagggtatggatgtgtgcataattagttaatgaatatattcattctttccaccatccctcattgatttgtctactgcgtcccagcagcagggaatgtgatggttgataagaacttgtttctgctctcatggtgatcccagtctactgggattccacgatctgttcagacaggtacaacctgttgtaatcaatgctgtgtattcattaggatagaggtttggctactgtaacagttaggtagagattaatttatcatctaaacctatagagcagcagtctccaacctttttggtagcagtgaccggttttgtggaagacaatttttccatggaccagagttaggggggatggtttcaggatgattcaaatgcgttacatttattgttccctttatttctattattattacattgtaacatataatgaaataagtatacaactcaccataatgtagaatcagtgggagccctgagcttgttttcctgcaactagatgatcccatctgggggtgatgggagacagtggcagatcatcaggcaccagattcccgataaggagcgcacaaggtagatccctcacatgtggagttcacagtagggtttgcactcctatgaggatctaacgctgcagctgatctgacaggaggtggggctcaggtggtaatgcgagcaatggggagtggttgtaaatacagatgaagctatgctagctcacctgcccaccactcacctcctgatgtgtggcccagttcctaacagaccatggaccggtaccaggaggcttgtactgggagctactctggaggctgaggtgggaggatcacttgagcccaggaggtggaggctgcagtgagctgtaatcatgccactgcactcaactgggcaacagagtgagaccctgtcttttaaaaaaaagttaaaatcactcctgtaatcccagcactttgggaggccaaggtgggcagatcatgaggtcaggagttcgagactagtctgaccaagatggtgaaaccccatctctactaaaaatacaaaaattagctgggcttggtggcacacacctgtaatcccagctactcaggaggctgagcaggagaatcgcttgaacctgggagccagaggttgcagtgagtcgagattctgccactgcactccatcctgggtgacagagtgagactctgtctcaaaaaaaaaaaaaaaaaaagaaaagaaaaagttaaaaaaaaggccgggcgcggtggctcaagcctataatcccagcactttgggaggccgaggcaggtggattgcctgaggtcaggagtttgagaccagccttgccagcatggtgaaacccgtctctactaaaaatacaaaaattagccaggtgtggtggcaggtgcctgtaatcccagctactcgagaggctgaaggaggagaatcgcttgaacccaggaggcggagtttgcagtgagccaagatcacaccattgcactccagcctgggagacaagagtgagacttcatctcaaaaaaaaaagttcaaaaaaaccccaaccaattctctcctccccaataattaccttaggacaacaggcataagcttgggtcatccttggcaaactaggaggtaagtcactctatgtagcagagaaccaaagtaacaaggacttaaataaaactgaagattatttatttcttatgcaataatctgagcttaatcagtccaaggctggcatggtcctttctacaatgtcaaagaccagctcctcctgttctgttcttccgccacctgtgaatttcctttgtcctcagtttccaagaatactcatcaccatactcacttgccagccagataaaggggctagaatgttcctccctttaagaatgcaacctggaattgcacattatcagttagcttttgctgtgtaacaaacagtcccctaaaatggaatggcttaaagacaatatttgttattccaattaatttagtaaattgtctgggcagataggtgatctctgtggttagctaataacttggctggggtaggtagtctaggagggcctcattcacatatctgctggttggccagttgattagtataggatacctttagctaggtgcttgtctctgctccacacggtctctcatcctctggcaatttagcctgagtgcttgaatttggcaggagtattccaagaaagcaacaggagaagttgcaaagcctctatgggctaaagcgagccacaagaccaacccagatacaaaagatgaagacttagaatctacctctctttttttttttttttttttttgagatagggtcttgtcttgtcgcccaagctggggtgcagtgacttgatcttagctcactgcaacctcaaactcctggactcaattgatcctcagcctcctgagtagctggaactataggcatgtgccaccacacctggctaattttaaattcatttgtagagacggggtcttgctttgttgccaggctggtcttgaactcctggcctcaagcaattctcccaccccacccaatcctcccaatcatgtcttggggttacaggcatgagccaccatacccggcaattctctttggctggtaggagctggaaagtatttgtaatctaccacaaagggcattcagggcagaggcaaccttatatatgagacctggagatgagagacagtaaaataggtgcatttagcgtgtggcaaccacttccacctggctggagcagaggtgggagaggtaagtgagaaaaaaaagagtagagtcatcagagaagtcagcaggggccgtggtgaggttgaactttgtgttggggatgatgggggaaccatggcaaggtttcaagaggagattgacatggttagatttgctgtatgaaggtgggctgggaggagtacaaaacggatcaggaagaccactgaggaggctgttgcagccacaaaggtgatcactgcggtggctgctctaggatttgggaacagggatggtgagaagagcttagatgtgacagatagtttggatgtagaatctgaataatctattgattgactggaaatggaggattcaatgaatcctccatttccagccaggtgcagtggctcatgcctgtaataccagcactttgggaagccaagacaagctaattgtttgaggccaggagttcaaaaccagcctggacaatgtaacaagaccctgtatctacaaaaaataaaaataaaaataacgttatctgggcatggtggtgcatgcctgtagtcccaacactcaggaggttgaggcaagaggatcaattgaacccaaaaggtggaggctgcagtgagctatgattgtgccacttcactccagtctgggtgacagagcaagacctcatctctacaaataaaaagttagccaggtgtggtggtgcatgcccatagtcccagctgctcaggaggctgaggcaggaagattgcttgagcccaatttcaaggctgcagattgcactactgcacttcagcctgggcaacagagtgagaccctgtctctaaagaaataaaaataaaaataaacccgactttcaaaacacttagattcgttcctggcttgtagacgatcacctatgaaattactctaacttggccgggcacagtggttcatgcctttaatcccagcactttgagaggcagaggtgggtggatcccctgaggtcaggagttcgagaccagcctggcctacatggtgaaaccctgcctctactaaaaatacaaaaaattagccaggcgtggtggcgggcgcctgtaatcgcagctactcaggaggctgaggctggagaattgcttgaacccaggaggcggaggttgcagtgagctgagatcacgtcattgcactctggcctgggcgacaagagtgaaacgttatctcaaaaaaaaaaaattactctaagttgattctgaaggattggggagtgttgaaaatcatcttgggttcctaagacaaattgctgggtggtaatggcaccattgttagatgaagaggctggagggagagcaagtttgaactggcaatgatgtcaatcttggacctgttaagtttgaggtgcccattgttgaaagaatgaacctgtttccccagctgtaagcaaagaaatggattgcaatgaaaaggcatgctttcaactgttgttccaaaacctttgtcctcatctggaacggaggtacagactgtctcttagttactgtgttattcatttctatttatttatttatttttgagatggcgtcttgctctgttgcccaggctggagtgcagtggcacgatctcagctcactgcagcctccgccttccaggttcaagtgatcctcctgcctcagcttctcaagtagctgggattacaggcatgcaccaccatgcccggctaatttttgtatttttagtagagacagcatttcaccatgtcggccaggctggtctcgaactcctgacttcaagtgatccaccctcttcggcctcccatagtgctgggattataagcatcagcctccacacccagcctcatttatttattcaataaattgtattgggcactattgcatgccaccatgtggtgttcaggattcagaggtgactcaaccctgggtcctgacttcatctggagagagcccagcacaggcgtcttcgttgtcaggcctgggttgaggagggacatcatgttaagggaggctgcagttgggggagaatgaggactctgcttggctgaagacattggggaaggtttcctggaagaagagatattggagatgggccttgaaggatgagtaggagttcaccaggcaaataggagaggaacttttagcccagacagcagtcctttattcatctccctgcatataattactgtaagaatcggcaagagaagctggaatggagatccatgaggtctctgaggatcagacagacacatcacagctaactctggcccaaagggtacttcattaggataacaccagctactgtaacaaacaagacatttcagtgacttcacatggtaaaaattgatttcttgtacacaaaacagtacaatgcatgtgcttctagttccaggtcggggggcttttccccgcagataattcagggacccaggctactttcatttgcagttttgccatcccttagagtctcagcctgcagaaaatagggagagaggaggtatggagaagtaatttctccttaaatacagtgccctgaaagtgatgcttatgacaaatgctcctattctattggccagaagcagtcacatgactgcatccacatgcaaggagagatgggaaatgcagtccttagctgggcagccattttccagcagcaattccatattatggaagagaaaacacgaatattggtggatctttagtggcctctgcccgaggtagacagcaggaatagaactaagggcttggaggcagtaacactcagtttgatttgtgctcttgagtaaacccttcttctcactctttgggtttctctctctgagtgatgagtgaagattggaagctgattaatatctgaggtattttccagtttcaaaaattgaccgggtgcagtggttcacacctgtgatcccagcactttgggaggccaaggcaggcagattacttgaggtaaggagttcaagaccagcctggccaacatggtgaaaccctgtctctactaaaaagaaaatacaaaaattagcagggcatggtggtgggcgcctgtaatcccagctgttcgagaggctgaggcacttgaacctgggaggtggaggttgcagtgagccaagatcacgccactgcactccagcctggatgacagagggagactctatctcaaaacaaaaacagaaacaaagacaacccaaaatacaaaaattgatgggttggtgaatgctcttggtttcccagctggagctaagatgatgatggtggtgatgctcatggtcatgaatactattgtggtaatgatggtggtgatgattataatggtaacgatgatggtgatggtggtgataatgatgatgatgatgatgatgataagaatggtgatgaggagaatggtgatggtggtgatgatgatattactatcataatgataatgataatttccagaacttgaaacgtccagccctttttatgcatcatataactgaattacaacaacatgacacagtaggcataaacccttcatgttggttcatttgcctttatccttgttacctatttattgctaagtaacaaattatccccaaacttaattgtataaaacaaccatttattatgcttatggattatttgggtcaagaattctgaaatagctcatctaggcagttcccctttagggtttctaatgaggttgcacacagatgtcggctggggctgcagtcatctaaaggccttagctggagggtctacttcctgagtggctgggccacatagagcttcagctcctctccacctggggctccccacaggactgattgagtggcctcacaacatggtcgccggtgagtggtccaagagaccaaaatggagcttcgatatgtttcattatttagtcttgagaactcacatcttgtttcttccaccctgttcttttagtgacacatggccagtcttggttcaatgtgggaggggattacaaaaaggcatcttaacttatgtatgaatactaggagctatggaccattgggggccatcctggaggctggctactacaaacacattgtcttaattactgtagatttatggtgtcttaatatttggtaggactcataccctttattttccctctgtaggagtatattggctactcatggctgaggttttctatacaaatcttaggatttgtatgtcaagttcaatgaaaagccattctggggtttttaattgaaattggattaaatctatagctcaattttggagagaattgaagattttaaaacttgagtcttggggctgggtgcggtggctcatacctgtaatctcagcactttgagagcctgtggtgggagagtcacttgaggccaggagttgaagaccagcctgtgtgacatagtgacatcctgtctctataaaaaatctttaaaaaaaaattagccaggtatgatggcatatgcttgtagtcccagctacttgggagactgacgcaggaggatcttttgagcccaagaggtcaaggttacagtgaactatgatcgtgccactccactccggcctgggtgacagagtgataccctgtctctaaaaataaatcaatgaatgaataaataaaataaaacaaaacactgagtcttgctagaaaggaactggtatatattctattttgtttaggtcactagctttatgcagttttgtttcacatcttctaggctatggtcaatagtatccttttaaaatcaaagtctgatttccctatgtgaaaagctaaattcttcattttatcattcaatcagttctagcaactgtggacacttgtgcaatccacacccttatcaaaacagaacatttccatcacttgtggcctctctgagtcaatctctaccttccctcttgctccggaagcaaccactgatttgatttctatcatcataggttagttttgcttactgtaggatttcacaattttttttttaatttgtgagttatttttgcttatgtactgacacttagtacactttgtatactggttttgtattcagccacactgccaaataattttattaatttcagctatttatctatatattctttgggaatttctatgttgatgattgcttcttctgcaaaaatgactttctttctttctttcttttctttctctccttccttccttccttccttccttccttccttcctttctttctttctttctttctttctttctttctttctttctttctttctttctttctttcctttttccctctgtcttgtcttgcagtacaggctgagatcttcaatacaatgttgaatagaaatggtgatagcaggttccgttgcgtagttctgatttcaaagggaatcttttcaacatctcattattaagtacagtgtttcggtctaggttttctgaagaccttctttatcaggttacagaagttcccttccatttttactttgccaagagatttttttccccctctttcttttgatcaggaatgaatgttgagttgctaccgcatctttcatgtgtcttctgttgcagatttctctttttgacaaaaagagaacaggtcttgggtcagagccttgggcgagcaacagaatctacctagaatttagtaacgttgtttgaaccatatttattctacagttgcttcttcttttatttatttatttatttattttgagacagggtctcattgtgttgcctgggccggagtgcagtggtgcgatcatagctcactgcagcctctacctcctggcctcaagtgatcctcctgcctcagcctcccaagtagctgggactactggccatcacaccaggctaatttttgtattttttgcagagacagtgtctctccgtgttgctcaggctggtcccaaacccctgacctcaaagtgatcctctcgccttggtttcccaaagtgctgggattacaggtatgagccatcacacccatcatacagttgtttctgtttgtagcccgtgagcttagttttgtaggaggatgtaaagctctcttcttaaacacaaaagagttaaagttcatgttccatatgcaatgggttgcatagactgtggcagcaattgagaagatgatacattctgcaaatggaagtgtgagaaacagggttacaacagacattaagtgccaaatgaattcacacacacagctatggcataatggttacgcacaggcttggaagtcatgctgcctgagtttgtatcccggctgtgtgtctcacctcagtttccttctctgtaaaatgaggataataatatgacttaccttgaagagttgctgggaggagtccatgttatctctgcagcatgctgaaaattgagagcatggtgggtggaagctcatgctagcttccactacacacaaggtaaagagaaaaggctgtggtcaagaaagtgggctcagctgggagttgtggctcccacccgtaataccaacatttagggaggctgaggcaggaggattgcttgaggaccagcctcggcaacataatgaaactctctgtctctacaaattttttttttttttttttttgagacggagtctcgctctgtcgcccaggctggagtgcagtggcgcaatctcggctcactgcaagctccgcctcctgggttcacgccattctcctgcctcagcctcccgagtagctgggactacaggcgcacaccaccacgcccagctaatttttttgtgtttttggttgagacatggtttcaccgtgttaatcaggatggtctcgatctcctgacttcatgatctgccctcctcggcttcccaaaatgctgggattacaggtgtgagccaccatgcccggctacaaaaacatttttaaaattagctggatgtggtggcacacatccattgtcctggctgcttgggaggctgagctgggagcattgcttggtcccaggaggtgaaggctgcagtgagctatgattgcatcgctgcactccagcctggacaacagagtgagagcatctctctctcgctctctctctctctcacacgcacacagacacatacgcacacacagacacacacacacacagaacgtgggttctagattcataccatctcggagtttaattgcagctcctcccctaacttactcttgctgttaatctcaagcagcatccccacaccgatctaagcctgctttcttgtaggtaaaatagacacagacgggtgtggtggctcatgcctgtaatcccagcactttgggaggccgaggcaggtgcattacttgagatcagttcaagaccagcctggacaacatggtgaaatccccatctctagcaaaaaatacaaaaatcagctggacgtggtggcacactcctgtagttccagctacttgggaggctgaggtgggagaaccgcttgaacctgggaggtggaagttgcagtgagccgagatggtgccactgccctccagcctgggcgacagagcaagactccatctcaaaagggtataaacactgacagtgtggttatgagaatggagttaatctgaatgcctaaccatgtgtagtaggcatccaagaaatgcattttttttttcttttgagatggaatctcactcttgttgcccaggctggagtgcagtggggatatctcagctcactgcaacctccgcctcctggttcaagcaattctcctgcctcagcctcccaagtagctgggattacaggtgcccgccaccatgcctggctaattttttttgtttgtttttttggtatttttagtagaaatggggtttcaccatgttgcccaggctggttttgaactcctgacctcaagtaatctgcctgcctctgccttccaaagtgctgcgattacagggatgagtcatagcacccagccaaaaaatgcaaatattgttatggtaggggcacagagtaggggttggcaagtatgtcagaatcacctgaggagagtgttaatatgcagattcccaggccccacctccatccatctagttaacaaacatatatcaggggcctcctacacataaggtactatcatagttgctgggcattcaagaaacagaacgatggccctcccctcttcaaactgacattttatttgggtgagataaacaataaacacaacaagagaagcaaaactaaggggatagaaaacgccggagtaggggtgtgggattttatgaaattttaattaatttatgtatatatttattttctgagatggggtctcgctctgttgcccaggctggagtgcagtggcaccgtcgtggctcaccgcagcctccacctcctgggctccaacaatcctcctctctcagcctcccgagtagctgggactacaggcacccgccaccttgcctggctaattttttgtgtttttagtagagacgggatttcaccgtgttagccaggatggtctcgatctcctgacctcgtgatccgcccgcctcggcctcccaaagtgctgggattacaggcatgagccaccacgcccagccttaaatttgtttttgtagaaatgggatctcattatgtggccccaggctgattttgaacacctaggctcaagtgattctctcacttccacctcccaacgtgctgggattacaggtgtgcaccaccacacccagctgactttttattttttgtggagatggggtctccctgtgttgaccaggctggtcttgaactcctgggctcaagtcaacctgggagtgggattttaaatagggtggctagaggaggtctcacagagaaggtgtcctttgaggaaagacaaagacgttggcaaggaactttcttctggatatcagggtgtatttgtttgcgtgggtgccacaacaaagtaccacgagcttggaggcttaaacagcagaaatttatcttctcacaataaatgtcttgttcacctccctatcctcccctcttcttcctcctcgcccactctaactccagccacatgggcctccttgctgttcctccaacatgttaggcaagatcctgcctcaggaccattgcatgcactgttctctcttcttggaatacactttcttgtgtgctatgggttgaactgtgtccccccaaaatttatacattgaagtcttaacccctagtacctcagaatgtggcagtatttggatatggagtatttacagaggtagttcagttagaatgaggtcatctgtgtgggccctaatgcactgtgactgatgtccttataagaagagtaaactagggtgcaggcagggcaagaccacgtcacagtgcagggagaaggtggctgtctactgaaatgagcccttagaggaacctacaaatatctagtcctaaaaagtagaaacaaactggccgggcgtggtggctcacacctgtaatcccagcactttgggaggccgaggcgggtggatcacctgaggtcaagagttcaagaccagcctgaccaacatggtgaaacctcatctctactaaaaatacaaaaataagctgggtgtgatggcgggtgcttgtaatcccagctactcaggaggctgagacaggagaattgcttgaacctgggaggtggaggttgcagtgagctaagatggcaccattgcactccagcctggcggacaaagtgagactccatccccctcaaaaaaaagaaagaaaagaaacaagctatccatgaaaacactttgtgatgtgctgttttatatcacagaatggaacctgtgttttgattcaacaagttcaaaacactcttttcataaaatctaagaagttatgtttctgaacctattgagcctttataggaacatatgaatatccagtcctaaaaactagaaatgagcgatctgtgaaaacactttgtgatgtgctgtttcatatcacagaatgggacctgtgttttgaagaaaccaaccctactgacaccttgatcttggacttctagtctcagaactatcttggacatttcctatgaatagaattgtacaatacatggcattttgtgatttgcttctttcactgagcatgtttttaaggttcatccatgttgtagtgtggaacagtattttgctccttttttatggctgagtaatattccattgtgtggatttgcctgtactggacatttcctataaatagatgcatgcaatacgtggctttggaagatggattttaaccaactctactgacgagtctgctttaggactcttggtccagactgacttcatggagagtgttgggggttgtgggagaggccaagcctacaagctgtgggaagctggtggatggaaggctggttagaattcttcaggatctggggaacctcagagagtgctgaacctgttgggacgttggatgagccaatacttggcaaatgcaagaatacaaaggtttctttctttctttttctttttccagatactcaaaagctggggccatgttacatgtgcccagctgtttcattagttaatatcttttggttgcaggccatggcaaccaaatctaaagtaacttaaacaagaaaaggaatgttttggctcatgaaataaaaaagtttagggatggccaggcatggtggctcccacctgtaatctcagcactttaggaggccaaggtgggcagattcctcaagtccaggaattcaagaccagcctgggcaacatagcgagacctcgtctctacaaaaaatacagaaattagctgggtgttgcgacacatgactgaagtcctagctacctgggaggtggaggcaggaggcatggttttttgtttgtttgtttgagacagggtcttgctttgttgcccaggctggagtgcagtggtgccatcatagctcaccgcaggctcgaactcctgggctcagtgatccactcatctccgcctcctgagtagttcaaaatgtttttcaggtcatccacattgtagtatgaatcagtgcttcattcctttttatggctgaataatattccattgtatggatataccacatttgtttaaccgttagtgattaattttatcttttgtgaattttaactcaataaaaacattcagagcatagatctggatcaggcacaacttaatctttaccagaagataattcaatttcatggaagagggtctgtgctttcatttcccctccacaccagtccccaagctaggtggcctgggggtcagtttctcccctgccctttcgtactgccccaccctcatttctctgtctcctcacagttcctgtgccttaagaacattagaaccttcctgtccacctgctgtgagaagttcggcctcaagcggagcgagctcttcgaagcctttgacctcttcgatgtgcaggattttggcaaggtgagctgcacacttgaagcccaaagactgagtttcagttaatttctattgacgtctacactgggcaagctaaggactgtcaggggacaggcagacaagccagaccaggccatatacaagacgcaaatagcactggcttgggatatgtggaactgggtttgagttcctgctctgacacttgctgtgtgaccttggatacgtggctgtgcctctctgagcccctcgtttctcatctgaaatatgggaatattatcatcctgccctctctgagtggctatgaggattaaatagaaagatagagggccgggcgcagtggctcatgcctgtaatcccagcactttgggaggctgaggtgggcagatcacgaggtcaggagatcgattccaccctggctaacacagtgaaaccccgtctctactaaaaatacaaaaaattagctgggtgtggtggccggcgcctgtagtcccagctactccggaggctgaggcaggagaatcgcttgaacctgggaggtggaggttgtagtgagccgagatggtgccactgcactccagcctgggtgacagagtgagactccgttaaaaaaaatactaaaatataaaagaaagaaagaaagataggagcaaagggtggggctcatttgagagaacgatggtatggggaataggaggtagagaaaatcctgaattaggcttccaagaggcatgggatctagcgcctcagacagagccttgcagctggaagctgtgttctgccgtgggggtgtacaaggggctcactgagtggccactgccccgtcacaggtcatctacaccctgtctgctctgtcctggaccccgatcgcccagaacagggggatcatgtgagtaaccacctgggccttgggccatttagccccagtcctccccctccctgaagccccacttctacccagcccccaggcccctggctcacaccctcctgaccccccaggcccttccccaccgaggaggagagtgtaggtgatgaagacatctacagtggcctgtccgaccagatcgagtgagtgctcaggcctgtggccgcacagctcactggagcaccgtcctgggggtggagggtgtggggggacatggccttgccctccgggaaataaggtcataccctggtgtctggggcacacaaccttgcctgagagtctggggagacacagccctgccctggggtcttgggggacatggcactgtcctggggtcttgggggacatggccctgccctggagcttggagggacatggcctgcccttggagtctgaggtcccacccttggagtcttggggggacaaagccctgcgctggggtctgcggggaccctgctgtgatctgggagaggtccaagggatccctgacctcacaacccacagcgacacggtggaggaggatgaggacctgtatgactgcgtggagaatgaggaggcggaaggcgacgagatctatgaggacctcatgcgctcggagcccgtgtccatgccggtgcgtgacgtggagggtcgggcctggggagggcgtgggcggggggcagccccaggccccccaacaccggcctctcccctcgctctcagcccaagatgacagagtatgacaagcgctgctgctgcctgcgggagatccagcagacggaggagaagtacactgacacgctgggctccatccagcaggtgggcgcctcccacccagcgcctgccgggcgcatgcgcgggagctgggccggcaggtgcacgtccacctgtccggccgctctgggcagctgaggatttcctgctcccatcgcttttcctttctgtgactgtctccgtctctgagtttctctgacttacatatgtatatataaatatgagtctgacgtatatatatattaaaaaatatatataaaatataggacactgcctgcaggagcagtcaaaaaaccaaaaacaaacaaaataaatacaaaatcaaaaatatataaatatattaaacatatacataaatagaaaatatataaatatatacaaagtatatataaaaatataaacatataatatgtataaaatataaacatgatatatgatatttataagatataaaatatatagtttttcatatagagctatatgtaaataatatatacaatatataaatatataaaatataaaatgtagatatattgatataggtatatatctttttatatagatatatatttttaatatacaagatatatgtccatatgtagatatatatacctttatatatcttatatacataaaagatatatatctttatctatctatcttttttttttttgagacacggtttctctctcattgcccaggctagagggcaatggcaagctctcgctttactacaatctctgcctaccgggctcaagcaatccttctgcttcagcctcccaagtagctgggattacaggcatgcaccaccatgctcgactaatttttgtatttttagtagagacgaggttttgccatgttggccaggctggtctcgaactctgacctcaagtgatctgcccacctcggcctccaaaagtgctgggattgcaggcatgagccactgtgcctggcttatatatctatcttttaaagatatatatcattatttaaagatatatatataaagtatgtataagatatgtaatagatacaaatatatattttatatatattttttgttatgttaaccaggctggtcttaaactcctgggctcaagcaatcctcctgtaatccaagccctttgtgaggctgcactgggcctcttcctcttgtctctctgtctctctctttatctctcactctgtctctttttccctctgggtctcctctcgctactttcttcctcagtgtgtcattctctcctttgtagctctttatcccaggctcagtctttttctgtatcctcacctctccatttcttttaaaaatagctttattgagatttcattaatatacatgtaatccacccatttagaatatacagttcaatggtttttggcacacacaagattatgcagtcatcatcactgtctaattttggaatattttcatttgttttgttttggttttttttgtttctttttttttgatttgttttgttttgaaatgtggtctcactctcccatccaggctggagtgcagtggcacgatcatagttcactgcagcctcgaactcctgggctcaagtgatccccctgccttaacctcctgaggagctggggccacgggtgcatgccaccacaccctgcttaattctttaattttttttgtagatatggggtcttgctatgttgcccaggctggtctcctactcctggcctcaagtgatcctcctgccttggcctcccaaagtgttgggattttgggtgtgagccaccaccccggccttaattttagaacgttttcatcatctcccaaagaaaccccaaactctttagctgttccccttcaatctcttatcttcccccggtccatggcaaccacgagcttactcgctgtctctgtggattggcctcttctggacatttcatataaagggcatcacatactatgtggtttatatgtgtctggcttcttttgctgagcgtagtgttttcaaggttcatccacattgtagcctgtgtcagagcttcattccttttcatggctgaataatattccattgtatggatggaccacattttttttttcttttttgagatagagtctcactctgtcacccaggctggagtgcagtggcgtgatctcagctcactgcaacctctgccatccaggttcaagtgattctcctgcttcagcctcctgagtagctgggatcacacgcatctgccaccgtgcccagcttatttttgtagttttagtagagacggggtttcaccatcttggccaggctggtcttgaactcctgacctcgtgatccacccacctcaggctcccaaagtgctgggattgcaggcgtgagccaccgcacctggccggaccacatttgaaacacccatttacccattgataagcattttggttgtttccgcttttgggttattatgaataatttcactgtgaacattcttgtacaagtttttgtgtggacgcgctgcctctctttatctccctctctctgtctccttcccctgtctctctgagactggtctggaggagggaatcttatcttccgtcatctttctctcccttccccgcagcatttcttgaagcccctgcaacggttcctgaaacctcaagacattgagatcatctttatcaacattgaggtgagccggccgatccccagccctcttgggtctgtctagtgcggataacctgctgcccctacctctccctggagtacgggggttgggagttgagcggcatggggcgggtggatgaccctttccttcctggccccctgagccctgggctctggtcccagccctcacccttccctccgagtaggacctgcttcgtgttcatactcacttcctaaaggagatgaaggaagccctgggcacccctggcgcagccaatctctaccaggtcttcatcaaatacaaggagaggtgagacccagctggccagactgaagctctggggtcactctgtcttgcctaggctgggcatctgagagaccttaccctcagacaccactggacggggaggactttttgctgtgtgttcatgggcgaggggctgcccatctctggttcaattcccagctctgctgtgtggcactgggtagtcacttaacctctctgtgcttctgcttcctcatctgtacatcagtgggccacaggaatgtgcctcctaggctggtggtgagggttgactatacggatgcacacagggcctggcacatagtagatgctcaataagtatttgttaaatgaaggaacattggccaggtgtggtggctaatgcctgtaatcccagcactttgggaggctgaggcgggtggatcatttaaggtgaggagttcaagaccaggctggccaatatggtgaaaccccgtctccatcgcctaaaaatacaactaaaatacaactaaaaatacaaaaaacaattagctgggcgtggtggcatgcacctgtaatcccagttactcaggagaattgcttgaacccgggaggcggaggttgcagtgagtcaagatcatgccactggactccagcctaggcaacagagcaagactctgtctcagaaataaaaacaggccaggcgtggtggctcacgcctgtaattccagcactttgggaggccgaggagggcagatcacttgaggtcaggagttcgagaccagcctggccaacatggcaaaaccccgtctctactaaaaatacaaaaattagccaggcatggtggcaggtgtctgtaatcccagctactcggggggctgaagcaggagaatcgcttgaacccgggagatggaggttgcactgagcccagatcacaccactgtactccagcctgggagacaagcgtgaaaccccgtctcaaaaataaataaattaattaaattaaataaaaataaataaacattgggcagagacaataccaggtactgtggtgaaattactgtagcattaaatgagataatgctacaatagcctcacatgggagatgctattgttatgcccatttcacagatggagaaactgggactcaggtttcttctccagcggggaagagcaaggccagggctgacgccagcctctgcccgaccttgatgccagtcacctttacctggtggcctgtcttctccctgtaggttcctcgtctatggccgctactgcagccaggtggagtcagccagcaaacacctggaccgtgtggccgcagcccgggaggacgtgcagatgaagctggaggtgggcgccgggccacttctcgggggcctctcccgctcctccccaggccctgggggcagcagggaggacactgagttgcagatggtccactttctgctgcagcccagccagagatccaccaaaggactagggagggaggtactagccagccaagcagaggaaatggagaagaacagaaatgggctggccctgggtctgggctgacccctgatatcagggtgaagtcctgaccctgaactgagctctgatctcacactcaaccccagccctgggctgagccctagcactgattgtaccccaagtcgggctgagctcccacttctcactgaaccccaattccaaccaacccctgatcccaggctgaacttgatcttgaactgaacttcaacctggatctgtctggtggaaacacagacagggcaggggtggtgaggacgggggctctccagatctgtccccctccccatctccagcccccctcagcaggcagaatactggacctctatcccaggcagcatttgccacattccagtgggtttgtttgtttgtttgttttgttttgttttgtttttttgagacagggtctcattctgtcccccaagctggagtgtagtggcatgatcatagctcaccacagcctcgacctcctggactcaagcaatcctcccaactcctaccttggcctcctgagtagctgggactacagatgcatgccaccattcctggctaatttttgtgttttttgcagagatggggtttcaccatgttatccagggtggtctcaaactcctgggctcaagcgactcacccactcagcctctcaaagagctaggattacaggcctgagcaatcgtgcccagcctcttcccattgcttttttgtttgtttgtttgtctttgttttttgagatggagtctccctctgtcacccaggttggagtgaagtggtgtgatctcagctcaatgccatctctgcctcccgggttcaagcaattctcctgcctcagtctcctgagtagctgggattgcaggagtctgccaccacgccagctatttttttttttttcatagcagagacggggtttccccgtgttggccaggctggtcttgaactcctgacctcaagtgatcctcccgcctcggcctcccaaagttccttccagtggttctcaagctgcccccacctcatggagtccttttcctgtttccttgggggcagatatgatgctttggcctctagaaaaattcccacagctctggggtggagagctgctcacgtatttattcaaatctatctgcacccaccctgcaactggctgtttctgggacctgcctcagtttccccattgttctctgattccccaggaatgttctcagagagccaacaacgggaggttcaccctgcgggacctgctgatggtgcctatgcagcgagttctcaaatatcacctccttctccaggtgccaggcacatctctaggcgtgggctccacgtacctactctcctgtgtctataaaagtggggacggggctggcttctgggggttgggtctctaggacgctcggggatgggtcactggggtcatgtctcagcctccagggtcagcagtacgatggaggagctggtgagctagcattgtttggaaggccctccccgcagggagaaggggaggggcccaggtgacgtctgacgtcttggttctctcaggagctggtgaaacacacgcaggaggcgatggagaaggagaacctgcggctggccctggatgccatgagggtgagtgggtgtagggtgctggtgactcacctgctgcagacaccctcctggtaggggctgatcctctagccgggattaggtaggagcctgggtcggctgttggggggccaggttcacccctgccccctccccaggacctggctcagtgcgtgaacgaggtcaagcgagacaacgagacactgcgacagatcaccaatttccagctgtccattgagaacctggtgaggcggtggagccgggtgggccaggggtgtggccacgtggggagagtgtgtgtctggctcctttcttgggagacccttgctagaccccctgcctactgcataggaccagtctctggctcactatggccggcccaagatcgacggggaactcaagatcacctcggtggaacggcgctccaagatggacaggtgggtggagtcaacatggatctgggatggagcctgggcaaaggggtgggaccaggctcctagatgggcaggtgggtggagtcaacacagatctgggtggagcctgggcaggggcggggccgggcttctagatggacaggtgggtggagtcgacatagatctggagcagagcctgggcaggggcagagccaggcttctagataggcagatgggtggagtcaacacagatctgggaggagcctgggcagggatggtgccaggctcctagatgagcaggtgggtggagtcaacacagatctgggtggagcctgggcaaggtgggggccaggctcctagatgggtaggtgagtggagcaaaccatatctgtggtggagcctgggtagggatggggccaggtttctagataggcagttgggtggagtcaacataggtctggggaagagcctggataggggcgtggccaggctcctagatggacaggtgggtggagccaacacagatctggggtggagcctgggtaggggtggggccaggttcttatgtagacttgtaggtggaattaagatgaatttggggagggacctgagtgggggtgaggcaagatttctagacagacaggtggtagacccatccagagaaggcggtggagccttgatggacaggcaggacagggccagcgaggggtatgggtggagcgaagactgacaggcagtagggccaatgcggatcacgtgggtgaagtcaggatggacaggtgggcatggccaagttggccaaggaggaggagaagggcagggtgggaccaggatgtggaggaactggtcagagggctgatggggacagttgggaagagccagacaggaatgcgttatccatccttccaggtatgccttcctgctcgacaaagctctactcatctgtaagcgcaggggagactcctatgacctcaaggactttgtaaacctgcacagcttccaggttcgggatgactcttcaggagaccgagacaacaagaaggtggggctttgacgccggaactatggggtcctccacgcagtcggcagcttagccctctccacttgggcatgtgcctgtttgccagactacatctacatggaagtgtgtgttaatccactcaacaggtgttttttgtttgtttgttttgttctgttttttaagatggagtctcgctctgtcgccaggccggagtgcagtggcacaatctcggctcaccgcaacctccgcctcctgggttcaagcgattctcctggctcagtctcccgagtagctgggactacaggcacacaccaccacgcccagctaatctttgtagttttggtagagacagggtttcaccatgttggccaggatggtctcgatctcttgaccccgtgatccacctgcctcggcctcccaaagtgctgggattataagcgtgagcccactcaacagtttttaaattgagcacctactatatccagggcactcttctaggcactaggactaaaatggaaagcaaaacagaattttcattttgtttgtttgttggtttgtttttgagacagtctcactctgttgttcaggctggaatgcagtggcacggtcttggctcactgcaacctctggctcccaggttcaagcaattctcctgcctcagcctcccgagtagctgggattacgggcacccaccaccatgcccagctaaattttgtatttttagtagagacgaggtttcaccatgttggccaggctggtctcaaattcctgacctcaagtgacctgcccatcttggcctcccaaagtgctgagattacaagcgtgagccactgtgcccagcttattttatttcttgtatggtacttgcgttcttatgggatgctttctacaaagaaaataaagtaggtggctgggtgcagtggctcatgcctgtaatcccagtactttgggaggccgaggtgggagaattgcttgagcccaggagtttgagatcagcctgggcaacatagggagatccccgtctctacaaaacataaaaaaaaatttagctgggcttggtggcacatgcctgtagccctagctacatgggaggctgaggtgggaggatcgcctgtggctaggagttggaggctgcagagagctatgattgcactacagctaggaccacagagtgagatcctgtctctattaaaaaataaatgaatgaaacaggagatgtggctgtggtaggtgagggtgggagggggagctatcttacctccattgttcagggacattctctgtggaagtgacatttaagctgagacccctctccctctcggctcttccttacttccttctgctttttctcctgtgaactcttccgttcgcttcagtttttgccctggagttccccctgtgctctggtctgtggcttctctatttctttttttgagacggagcctcgctctgtcaccaggctggagtgcagaggcatgatctcggctcactgcaacctccgcctcctgagttcaagagattctcctacctcagcctcctgagtagctgggattacaggtgcccgccaccacgcccagctaatttttttgtatttttagtagagacggagtttcaccacattggtcaggctggtctcaaactcctgacctcgtgatccgcccacctcagcctcccaaaatgctgggattacaggtgtaagccaccgcgcccggctggcttctctatttctcaacctgtgtctccctcgaggagccagttgctgtcttgtaactgcctgcttacagcatccgtctctcctaccaggctggagctctggggaccacatcctattcactgctctgtccccagctcctagcagtgtctgtttctcagcaggtgctgcaccaatgctttgttgaacagaaaaatcgatgatgagtgacatgctgtgtctggtgtgtgcttctgcaaaggggagtgtgtgtgtgtgtgtgtgtgtgtgtgcatgtgcacgcctgcgtatgtggttttgggtttatggttgtgtatttggatatcctagaaagcccttttacaaggatatccatgcatggtgctaggggcatagagactgtcatgggcttgcctgttccctacagagggaggggtgggtgggtgtgtgctcccaccctctgcgggggcagtgccttcagtctgagctctgcttccctgcagtggagccacatgttcctcctgatcgaggaccaaggtgcccagggctatgagctgttcttcaagacaagagaattgaagaagaagtggatggagcagtttgagatggccatgtgagtccccgtcttcctccctctttctgtccacagaggggcaggggctgggaaggaggaacgtgatctagtccctactctgtcctgacatgccatgggaccactctgaaccacagtctcttcatttgggaaataagagggacaggcccaaggctgtcttcatccttggaatgcaggggttgtgtgcaagcttcagttaccagcccagactcttctcctttcctcctcctctttcttgttctcctctcctcttccttctcctccttctggtttccttcctcctcctcctcctctttctccttctcctttcctcctcctctttcctcctcctccccttcctcttcttcttcctcctcctctccttcctccccttcctcctcctcgccctcctcttcctcttcctcctattcctcctccacctcttcttcctcctcctccctttcctccccttcttcctcctcctcctcctcttcctcctcttctttctcttcctcctccctttcctcctcttcctcttcttccttttcctcctcctccttcttcttcccctcttcctcctcttccacttttgtcttctctttctcctttttatgtgaggcaaaattccaacaacaaaaatctaacaatttcgaagtgtatgatcgcatggcattttgtacactaacagcattgtgcaaccatcacctctatccagtttcaaaaccttttcatcagcccaaaggagacctcatacccattaagcattcactcccaattccccgctctcgcagcccctggaaactcctagcctgctttctctttctcccaatgtgcatggcagcacgattcagtgtggccaaagggtgaaaacgacccaaaagccaatcaatgaatgagtggacacgcaaaacgtggtctgttcataccatggaatagtattcagccataaaaaggaataaaatactgaccttcttttttttttttttttaattttcccctgccagctccaacatctatccggagaatgccaccgccaacgggcatgacttccagatgttctcctttgaggagaccacatcctgcaaggcctgtcagatgctgcttaggtgagaatctgggaggagggtcctgcataccggacttggtcatcagttccttgctagagaagatggcctagtaattggttccctaaattgggagatgggggagtccctactttgatcttctgcttctccgtcactctcctgatctaaagagaacccaaggggtccctttatgtttttagcagaatatttggccctgtctgtaaaggtcactcgctcttctttatgtgttccctgcatctcagaggtaccttctatcagggctaccgctgccatcggtgccgggcatctgcacacaaggagtgtctggggagggtccctccatgtggccgacatgggcaaggtacgagtgggagggaggctgggaggtgagcttggttctctttggaggatttcccgttctcaccatttcctttaccctcccgtagatttcccaggaactatgaagaaggtaagactttcccgtggtccttcctgtgtaccacaaataatgggcaacagcgcggggaggacccaggacatcctggaactgggcaggatcctttgtggggtgaggagagtaagggggcctacaagcccccaggctgggcataggtagacaggctttctttgtttctccttccaggacaaactacatcgcagggctcaggacaaaaagaggaatgagctgggtgagttggcaggggttgctgtgtgggggcaggaggaaaattcatctctattgatgttgacccagggacagatctccataatcatattaacagccacattgggccgggtgcaatagctcacacctgtaatcccaacaatttgggaggccaaggcgggaggatcgcttgaagtcaggtgcacaccaccacgcctagctaattttttttttttaaatagagatgaggtcttgctacgttgcccagccatactgtataaattaaatcatacagtatgtgcttattttaattaattaatttatttatttctggagatggagtcttgctgtgtcgcccaggctggagtgcagtggtgtgatcttggctcactacaacctccacctcccaagttcaagcgattctcctgcctcagcctcccaagtagctgggattataggcacatgtcaccacgctcggctaatttttgtatttttagtaaagacggggtttcaccatgttgggcaggctggtctcgaactcttgacctcaggtgatctgcctgctcagcctcccaaagtgctgggattacaagcgtgagccactgtgcccagccttaattttaaaaaatttaaaaatatatgtattttattaaatatataataatttattatttaataatatattaatattaattaatataatatagtaataatatattataataatatataaaatatatattaatatatatttattaaaaatatattatatgtatatataatatatcttttttttatttttagaggcagggtcttgctctgtatcccaggctggagtgcagaggcaggagtgttccacttatatgccatttatatgacatataaatatataacataagtcaggtgtggtggttcatgtctgtgatcccagcactttgagaggccaaggccaggagtttgagacaagcgtgggcaacagaacgagaccctgtgtctacaaaaacatttttaaaaattagcggggttcttgcttgagcccaggagttcaaggttgcagtgagccatgatcacgccactgcacgccaacctgggcaacagagcaagatcctgtttcaaaaaaataaaaaaataaatatatgaaatctatgaatgggtatgttttcttcttattattacttactatgtaattagcaatagtcagtcagctttcttagcaagagtcaaaattagaaacaacccgtgtcctttgtacaatagaatatatatatgtgtatatatatatacatacacacacacacacacacacacacacacacacacgtattttattgagagaggaaatacatactttaaggtatgtaaaaatcaataaatcttaagtatatgacttaatacatttttatccatgcaaccaacaatcaaataaaaatgtagaacatttccatccctccagaactgcactgtgtaatataaattaattaaaatgaaatcaccttaaaaatttttttgctcacgttagccttgaagttctcaataatggcctgtggctagttgctaccatattggacatatccatcaccacagaaagctttgtcagaaagcactgctactcacctatctcccatagggaaccactgtctgacctctatcaccatagattaattttgcctgctcttgagttttctataaataaaatcatacagtacatgcttatttcatctggtttcttttatctgacgtaatgacggtgagatgcattgatgtgatcgcctgtagcaatagcttgttccttttcattgttgtatagtattccattatgtgatgatatcacaatttgtttattgattgatcaacctattgaggacatttggttggttgccagtttttggatattgtgtataaagctgcaacttttgaaggactttttttttgttttttgtttttttgtttagttttgttttgagacagagtctcactccatcgcccaggctggagtgcagtggcatgatctcagctcactgaaacctctgcctcctgggagttcaagtgattctcctgcctcagcctcccaagtagctgggattacaggtgcccaccaccacacccagctaatttctgtagttttagtagagatggggtttcaccatgttggccagtctggtctcaaactcctgacctcaggtgatcttcctgcctcggcctcccaaagtgctgggattacagacatgagccaccgtgcccagccaggacacatgttttcatttctcttgggttgctgggttacagagtagatacaatgtttagcttcagtagatattgccaaatagttttacaaagagtatccccaccagcaatgagtgaaaattccagtttctccacgtccttgtcaacacttagtattgccagtctaaaaagaaaaattttagccattctcgtgggtggcaagattcagggttgaaagttgactgccaaccaccctgtactcctgtaccctgtcctccaggtctgcccaagatggaggtgtttcaggaatactacgggcttcctccaccccctggagccattggaccctttctacggctcaaccctggagacattgtggagctcacgaaggctgaggctgaacagaactggtgggaggtacaggctggggccacaagagtgatggggtgggacccaagtgtagggttatggattcatgtggtctcagggagttgggtcatagttccaccatgctctggaggtgatgcctggggagtggggtaggtagactgagacttctgggcatggcttttctgagcgggccatcttcccaggaagctaatactcattatcacctctctgggctctccaggccatcctgagatagatggacaagcagagtgaccattgagcagagagatggacacacacacacacacacacacacacacacacacacacacacacacgagtgatggggcaggatccacgtgtagggttatgggtttagatggcaggtggggttatggatcctataacctctctgttcctgtttttgtctcctgggtgtttagggcagaaatacatctactaatgaaattggctggtttccttgtaacagggtgaagccctatgtccatgtgagtgcctcaagtctgaatggaataagggcaaggggtccagggcgggtcctgggaggatggacagacttggaaagacacccccggagttggggagggggctgcccatcatggcaggtctttctctaactcaaggcttcacccaccccaccaactgagcccagagaggggccaccctggaaacaatgattgatctttttctccttgatcatttttgtgtaaaggtcctttccttcctacatgggtatggtagggaggaaggagcagggacctagaaggtgggcctgccccttgcttccttctgagacaccaaattgagttctgtgggagcactgtggcctccattgcctgtgtccttgccctgctcctggtggacacacctgtccactccagcctctgctgttcttccagtgttctctgcttgatggacccctcgctcttcatgatgacttcagatctctccctctctccccaacctcagacaccccctacctcattcacagcaaatgaccccactgtacacttcacagcctgcagagggaaattctctccagtgctggttttaactttatattatttcagacttctagcaaagctatgagaataatgcaaagagctcctgtgtagcctttacccagtttcatcagttctgttaatgttttgttccatttgctctgtcatttcctctctctacccacacatagtatttatttttcctggaagagttaaaagtgagtttgcagacgacgttcccctttacccctaaatacttcttaagagcaagagccttctcatgcataaccagagcaagatattaaaagacacaaaattcaacattgacattatactattatttaattcatagtctgtatttaaatgttgtcaatttccccaaaaattttatcaaaaatttttttgttcctatggtttctccactgtcaagttacaataggaatttccaaccccatcattctttccaaatttattagctggtgttctgctgcaagaaagagctgtcctttctgccctcatctgtctgtctgtctgtctatctatctatctatctatctatctatctatctatccatgcatccatcttttatctatatatcatctatctatttacctatcatctatttgcctatcacctatctacccatctattatctatctatatcatcatcatcatcatcaatcttttatctatttacctatcatctatccatctattcgtcatctacatattatctatctatctatctatctatctatctatctatctatatgtctatctatccatgtacctacccatcaatccatccattcatcaatcagttcttctatccatccatccatccatccatccatccatccatccatccatccatctatcatctatctacttatcaatacattcatgatctattcatccacctatcatttatctatgtatcatctgtctatgtattatctatcatctatctattcaccgatcatctctctgcctatttttcacctaccgatctaaccatctatcatctgtctattacctatttattatcatttctctctcatctattcatttatcatttatccatcacctgtctgtttatcatctatcatctttccatctatctattacctgtttatccatcatccatctattctatctatctatctcttaattttttgttttagagagagggtctcattctgtcacctaggctggagtgcaatggtgtgatttaactcactgcagccttgacctcctgggctcaagcaatcctcccacctcaccctcctgagtagctgggaccacagatgcaagccattatgctcagctttatttatttatttatttatttatttaagatggagtttcactcttgtttcccaggctggagtgcagtggggtgatctcggctcattgcaacctccgccttccggtttcaagcgattctcctgccttagcctcctgagtagctaggattacaggcgcctgccaccacatctggctaatttttgtatttttagtagagatggagtttcatcatgttggtcaggctggtctcgaactcctgaccttgtgatccgccagcttcagcctcccaaagtgttgggattacaggtgtgagccactgcacccagccgcagctgtttttttgtgtgtgattttttttttttttagagatagggtctcactatgttgtccaggctggtcttgaactcctgggctcaagcaatcctctcatagaacatccttctcttttttcttttaaaaaattgaggtgaaatttgcacagcataaaactgaccgttacaatgaaaaattcagaatactgagtagctgagattacaggcgtgcaccaccacacctggctaattttttgtatttttagtagagatgggattttaccatgttggtcaggctgatctcaaactcctgacctcaaatgatctgcctgcctcggcctcccaaagtgctgggattacaggcgtgagccaccacgcccggctgggtatggcattttcttttggagtgataaaaatgttttagaactaggtagaggcggtgattcctcattcattttattattattatttttgattatggcaaaatatatagaacataaaagttaacaatgtaaccttttttttggagacaggatctcactctgttgcccaggctggagtgcaatggtgcaatcttggcccaccgcagcctcgcctcccaggctcaggtggtcctcacacttccgcctcccaagtagctgggactacaggtgcataccaccatgcctggctaattttttgtatttttcgtagcgatggggttttgccatgttgcccaggctggtttcgaacttctgggcccaagtgattcccctgcctcagcctctcaaagtgctgggattacaggcctgagccgccatgcccggccaacataaccattttctaaggtacagttgagtggcattaagtacattcacagtgttttgccaccatcaccaccatcatctccagaacacttttcatcttgcagcactctgaacccattaaacagcaaccacctattcccctctcccagcccctgacattcacattctactcttgagctctatggatttttctgtcctaagtacctcacctaagtgaaatcatacagtatttgtcctttgtgtctagcttgtttcacttggcataatgtattcaaggctcatccatgttgtggaatgtgtcagaattttctttctttttttttttttttttggtgaaatggagtctcgctctgtcacccaagctggagagcagtggcgcaatcttggctcactgcaagctccacttcccgggttcacaccattctcctgcctcagcctcccgagtagctgggactacaggcacttgccaccacgcctggctaattttttgtatttttagtagagtttcaccgtgttagccaggatggtctcgatctcctgaccttgtgttcctcccgcttcggcttcccaaagtgctgggattacaggcgtgagccactgcgcccggcctttttttatttttatttttttgggatggagtgtggtcctgttacccaggctggagtgcagtggtcgtgtaattataactcactgcagactcgaccccctaagcttaagtgatcctcccacttcagcctcctgagtagctgggactacaggcatgtgccaccatgcctggctaatttttctacttttaaaaaaatttttgagatggagtttcgctcttgttgcccaggctggagtggaatggtgcaatctcggcccactgcaacctcagcctcccgggttcaagtgattctcccacttcagcctcgagtagctgggattacaggcatgcaccaccacaccaagctaatttttgtatttttagtagagacagggtttcaccatgttggccaggctggtctcgaactcctgacctgaggtgatctgcccgcgttggcctcccaaagtgctgggagtacaggtgtgagccaccatgccgggcctaatttttgtattcttttgtagggacagggtttcatcatgttgcccaggctggtctcgaactcctgggctcaagagacccaccctccttggcttcccaaagtgctaggattacaggcatgagccaccgtgctgggcaattttcttaattcttaaggctaatattccatggtatgcatataccatgttttgtttatccgttttcctgtcaatgaacaattggttgcttcaacttttgcgtattgtgaataaagctgctacaaacatgggtatgcaaatatcatttcgaatccatgctttcaattcctttgggtatatactcagaaacaggacggctgggtcatatggtagtgtagttctagtttttaatgttttgaggaaccaccatactatttttcttttctttttttttttttttgatagggagttttgctctgtccccaggctggagtgcaatggaatgatctcggctcactgcaacctccgcttcccaggttcaagcaattctcctgcctcagccttccaaataactgggattacaggcatgcgtcaccacgcccggctaattttttgtatttttagtagagacggggttttgccatgttggtcaggctggtcttgaactcctgacctcgtgatccgcctgcctcggcctcccaaagtgctgggattacaggcatgagccaccgtgtccagcacatactgtttttcatagtgcaccattttccattcccaccaacagtgcacaagggttctgatttctccacatccttgccaacatttgctactttctgttttgtttgttgatttgtttttgccttatagtagctgtcctaattgttttaaggtagtgaaagtgagcactttcggccgggcgcggtggttcacgcctgtaatcccaacactttgggaggccgaggcgggtggatcacctgagctcgggagtttgagaccagcccgaccaacatggaagaaaccccatctctactaaaaatacaaaattagccgggcgtggtgacacacacctgtaatcccagctacctgtaatcccagctgaggcaggagaatcgctggaacctgggaggcggaggttgctgtgagccaagatcgcgccattgcactccagcctgggcaataagagcaaaactctgtctcaaaaagaacaaataaataaataataaatacatacataaaacaaaaaagaaagtgagcactttcatccatatttagatgagggttggtaaactttttctgtaaagagccgaagagtagtgtaaatctgctcaccctccagggtcccatatggttttgcaactcttcagctccgcccctgtagtgcaaaagtagccacagataatctgtaaatgatgtatagacacggctgtgttcctacaaagcataattcatgggcactgacaggtgaatttcatatgatcttcacaatcccaaaaacattcttttggctaggcgtggtggctcatgcttgtaatcccagacctttgggaggacaaggcaggaggattgcttgaggtcaggagtttgagaccagcctgggaaacaaagggagaccatcccccgcccgatcttgacaaaatttaaaaaaattaaaaattagcgggtgtggtggtgcgtacctgtagtcccagcacttgggaggctgaggtgagaggatcgcttgaacctgggagatcgaggctgcagtgagctatgatcatactgctgcactccaacctgggcagcatagtgagactctgtccctaaaaaaaagaaaaaattcttttgatttttgccaaccatctaaaaatgtaaaaaccattcttgacttgagggtaatgataaactgctgggaagacaacccctgctttatatgatactggggcagtctctcccccgaggttctgggactttatccccagtgagtaccacagtgcctggcacataataggcactcactaaatgcaagtggaatgagtgaatgaatgaatgaatgaagtgccctgccctctgctgtcaagctggggtctttacactaagttggggtctctctctgtattcttagggccctcctcaggacctgtctgttcatctctggtgagtagaaacatttatttttgtttcaatgagaggtttctgggttggggttccaggctgggtatgggaggaacctccgagccaattagttatgcattctgtgatccctgagcaccgacttctgaatctagctctgggctgggggctgctggggatgggacagacaaaggagggtccctcaccttgggagatgatggtcttgttggaaggaaaatggttacaatgatgatgacgatgatgacaatgatgatgatgataatgatgatggtggtgatggtaatgacagttccagttgtttttgtaggattttttgttttgtttgtttgtttgttttgcacctatagcatgtcaagcatataggggtggaggtttacagtgtggcttttggagcccgctgacctggattcaaattctgaccccaaccttacctagctgtatgaccttgggccggttacttaacctccctctgtttcagcattcctctctggaaaatagcttaatgacagtatctacttcatagtgtttttaggaggcgtaaatgagtctgtcaagtgcttagtcctggtcctgacacataatgaggactttatacagcattagctgttgttattactcatttaatctgttctaagatgcatggttgttttttttttcttcttcacatttgaacatctctgacattgaaatagctcttgcgatccacagtgtccatcttctgctgaattttataggcaggaagtgttctttcataatggcacataaaagaatggggcattgaacaattgctggcgcatcagctatttaatgagctcctttaatcttcacaaaagcccttcggaaaatagatttgattcttactctctgcccccatactttcttcttttcttcttcttcttctttttttttttttttttttttttttttttttttttttttttgcaaatgaggctgagagagggtaagtgaattacttaatgtcacatggtgaggaagtgatggagatgggatttgaacccaaagcctcagtgcctcagtttatcatctctggctagtaataaaacacagcatgatgatgctcccatcttcttgttgcccaggctggagcgcaatggcgtgatctcggctcactgcaacctccacctcccaggttcaagcgattctcctgcctcagcctcccgagctgggattacaggcacctgccgccacacctggctaattttttatattttcagtaaagacagagtttcaccatgttggccaggctggtctcgaactcctgatctcaggtgatccactcgcctcagcctcccaaagtgctgggattacaggtgtgagccacctcgcccagccgacgctcccatcttctaagtgtgtaccacatagtagcaggtgcactattgccatttataaaaaatgtgcatctgtggcgtctccctcttttcagaagaggaaattgaggcccagagaggcaaaaccagttgccgaggtcttagaacacgtaagaggcagggtcaggatttgaatcgtgctctcctgcgttagcgctccttccgcccttctgcgccgagatgtggtcaatggggtggggaccagggtgagaccagggaggctctctcgtgggtgcaagatttaaggggacgctgaaaatctcagtcattaaggtccatcatgttttaatgcaacattaaaaaaaatcaaaaacaagccaaaaaaatttcgagatgaacaaataccaaaactgtaactaaagacaggatccaatagagctgggagtaagaggaggtgggtgaggtgagtcgggcagtcagattctgtctttattcaaaatgttgatgtttgttcatcatggtttctttgcattcattaaaaaaagatgttaaacaccaactcgaaccagatttgcattcgttttttaaaattgaggtgaaattcggctgggcgcagtggctcacgcctgtaatctcagctctttgggaggccgaggcgggtcgatcacttgaggtcaggagttcaagaccagcctgggcaacatggtgaaaccctgtctctactaaaaatacaaaaaaaaattagctgggcatggtggcgcacgcctgtagtcccagctactcaggaggctgaggcaggggaatcgcttgaacctggcaggcggaggttgcagtgagccgagattgcgccattgcactccagcctgggcaacagagcgagactcggtctcaaaaaataaacaaacaaacaaataaataaataaataaaaatgaggtgaaattcatacaacataaaattaaccttgtaattgttactggcatttctatttctattcatatttacatttatattacatattaacatttacatgatgttagatattatatgcaattacatatgatttataattaatacttatcatttatattgtgtatttatgtttacaacctattatatattataccacatatcataaaatatatttatattatgctatgtattttcacaaattaatgttttttatttatgttgcacatttatgtttatattatattataccatacacaatatattataataagatttataggttacctatttactttacattatattatatttatctacaattatgtataatatataactaatatttattctttaaattgtatatttacatttatatcatcttatcacatattataccatatatcatagtatatttatattacagatttgcatttatattatgctacatattctagagaattaacatttattatttatattgcacatttatgtttatatatcatatgcgttatataatatactatactgtagctttatatattacatatttacatttacattatgttaggtgacataaaattatatattatgtataattaatatttattatttatatatgttacatttatgtcatattgtacgttatgtattttaacatacatttacattaacatgatgtatttacacttatataaaattatatattatgtataattatgtattacacataattaatattctttattgtatgttacatttaaatcatgttgtacattatatactataatatacattacattaacaagagatatttacgcttatataaaattatgtattatgggctgggcacggtggcttatgcctgtaatcccagcactttgagaggctgaggcgggtggatcacttgaggtcaggagttcgagaccagtttggcctacatggtgaaaccccgcctctattaaaagtacagaaaattagctgggcgtggtggtgtgcacctgtaatcccagctactccagaggctgaggcaggagaattgcttgaacccaggaggcagaggttgcagtgagccaagacagagcgaggcactgtctcaaaaaaaattatatattatatataattatgtattacatataattagtatgtattatttatgttgcccatttacatttataatatattgtatgttataccatatattatacatttacatagactatatatggtgtattccatgtaatataaatattacatgtatatttatattatattcatattatatattatagggttatatataactatctatattaacatatagctatctacaatagatagttatatattattatataatgattatatattattatatataactattatttatattgaatatttacactcacattataaatatattcatgttatatttatattcagtggctttttgtttttttttttttggagacagagtttcgcactgttgcctgggctggagtgcagtggtgtgatctcagctcactgcaacctccgcctaccgagttcaagcgattctcttgcctcagcctcctgaatagctgggattacaggcgcccgccatcaagcccagctaatttttgcatttttagtagagacgaggtttcaccatgttgcccaggctggtctcgaactcctgaccttgtgattcgcccacctcggcctcccaaagtgctgggattacaggcgtgagccacagcgcccagccagtgccatttggtatatttgcaatactgcgccgccatcactgccgtttagctccaaaacattctcagcacccccaagagaaaccccatcccgggcagttgctcctgcctcccgcagcccccgggaaccaagggtctccttcctgtctctgtggattggcgtgttctgggcatttcctatgaatggaaatcacacagtgtgtggccgtttgtgcctggcttctctcactgagtgtgatgttttaaggctcatctccattgtagcccatgtcagtgctgcttcccttttgatggctgactttattcattttgatttctaagaatattgtattagaatactgtttgttttacttattgtcatttaccttgatgactaggttttttggctctcacttacattttgcacctgaggctcgtgactcattctccttcccctacttctgtccgggtgaccacagagatgggcacacagtgagccttcaggaaatgcctggtgaagccatcgccaaattccagacacccagccagacccaaagggctgagccatccccccgaatccatgtgtcaaaccttagtggtgacctgtagaagtggaagcccgctccccatgtctgggctccggcccctgcctccacggggcctaccttggtgctgaagggctgttagagccaggctgtcaccaacttaaaaaatcaaaggggttcagggggaaaggcaacctccatatggcaatatggggacccaggcacggggaccgtgccacctctgtccttggtgtctctttgcaggtacgcaggccccatggagcgggcaggggcagagagcatcctggccaaccgctcggacgggactttcttggtgcggcagagggtgaaggatgcagcagaatttgccatcagcattaagtaactcctttctccctgactcatacccttttggggcctgggccctgcgggcctgggaaaaagggtatccaggttttactttatagaagtgtacggtaatagcatccaccttttactgagcccctgctggttcccacgtgcctttcaccttctttatttcttttaattgacgaccacaagaaagagatatgattcctatagaggctcaaaaaggctcttaaaattaattaattaatttgagtcagagtctccctctgtcgccctgacctttcttttttcccctttttttcttttcttttcttttctttttttttctgacagagtccctttgtcgcccaggctggagtgcagtggtgagatctcagctcactgcaacctcccaggttcaagcgattctcctgcctcagacccccgagtagctgggattacaggcgcctgtgaccatgcccagctaatttttgtatttttagtagatacggggtttctccatgttggccagcctggtctcgaactcctgacctcaagtgatccacccgcctcggcctcccaaagtgttgggattacaggcgtgagccatcgtgcctggcctgaaggcttttatttttaaccaattttcatatatatgttttttctttttttttaacttccaggaatttctaatttttttaatttaattttattattattattgttattttggtgacagtctgtctctgttgcccaggctggagtgcagtggtgagatcttagctcactgcaacctctgcctcccagattcaggggaccctcctagctcagcctccccagtggctgggactataggtgtgcaccaccacatccagctaatgtttatattttttgtagagacgagggtctctccttgttgcccaggctggtctcatactcctgaccttcaaacatcctcccacctcagcctcccaaagtgcaggtgtgagccactacatcccacctatatattttttttttcaacttattttagaatcagagggcacatgtgcaggtttgttacaaaggtatattgcacaatgctgagggttggggccatgaatgatcccaacacccagggagtgatcatatactcggtagtttttcagctctttcatcccaccctcctccctctagtgctcccccgagtctactgtttccagcctttttttttttttttttttttgagatggagtctcactttgccgcccaggctggagtgcaatggcatgatctcagctcactgcaaactccacctcccaggttcaagcgagtcttctgcctcagcctcttgagtagctgggatttacaggtgcacgtcaccatgcctggctaatttttttgtatttttagtagagacagtggggtggggggtggggggaaagtttcaccatgttggccaggctggtctcgaactcctgacctcaggtgatccacctgcctcggcctctcaaagtgctgggattacaggcgtgagccactgtgcctggccaatattattcccatctttatgtccatgtgtacccaatgtttaacccctgcttataagtgagaacatgtggtgtttggcttactgtttctgtattaattcatttaggataataacacccagtgcatccacgctgctgcaatgcacatgatctcattcttctttatggctgtatagtagtccatagtgtgtgtatatgtaccacattttcttatccagtccactgttgatgggcacctgggtcgatccatgtctttgctattgtgaatgctgctgtgatgaacaaacaagggtgtgtgtctttctggtagcacaattactttttcctttgggtagatacccagtcatagggtagctgcatcaaatggtggttctatttttagttcttcgagaaacctccaaactgctttccgcagtggctgaaccaatttacagtccagcccacagtgtagaggaattcccttctctcacatgctgctgagtttgtaatttcattgttatttttggctcctgtgaatttcccttactttttttttttttgagagctcagcaatttttttctcaacatttctagtgtttttttaaataggaagagttttgtttgtttgtttctttgttttttttttttttttttttgtgatctagtttgccagatgagcaggagtggaggtcttctccaaggccccttttagtctatttccaccatgttgacagaaatgggtctttcctccctcttcctttatatcctatggttgtctatattggtggaaggggaggtctcttcgtatccattctagaacactgccttctttacaagatcttactgacttctcaacaaacctgtgagtcagggaagatgattcctcttctacgagaggaagacattaaggctttagagtagcaaaggccccagggaatgggctctgttgggacagcttgtctttggtttccagtagttactcctccctgaaggggtcaaggttgcttcctccataactggggcttggtggggaatgggcctggtccccagactcagggcccggtgaccatctggttccagatataacgtcgaggtcaagcacattaaaatcatgacagcagaaggactgtaccggatcacagagaaaaaggctttccgggggcttacggtaagggtcaatgtccgctcaatcccagctttccagaacctaggaggaccctccctgcacctccgccttgggacccccttttcccacattcagggtgacccccctccagtggcactacagtgcaagtgaccttaaacttatgctcttaatgatgaacaatgggaataataatgaataacagcagttgaatattgacagagcacttaagtgtaagatatgttcatttttaaattttatttatacatatattcaagcattatgtatatatgtatgtgtgtatatatgcatatatacatacatatgtatgtatgtgtatttaaattttacttacgtatatatacatatgtatacatatgtatgtagggtacatgtatatacgtgtatctgtttatttttatatatatagatagatagagagagagagattgagagagagaaagagagtcttgctctgttgcccaggctggagtgcagtggtgcaatcatagtacactgcagcctcaaattcctggtttaaataatctctcgcctcagcctcccgagcagctggtactataggcatgcaccatcatgcctggctaattttaaaaaaaaattttttttttgtagagatggggacttgctttgttgctcaggctggccttgaactcctgggctcaaataatccttctgtcttggcctcccaaagtgttgggattacaggtgtgagctactgcattcagccctcaaatatgttatagatagaaacctaattaatcccctcaaccttctttctgagttcccatttcacagatgggtaaaactgaggtttactcctcgtctagcttcactgaatggcagagcccatagcttgtctttgcctaatctgctgcataatcatttcagcaacaactcaaatgccttttgagggttcttgcttctgtttggtgccttgtaattttcaaccatattttagacactttaggcctaatgatctaaggcatatggtttttacccatggtctgtgggcccttgagaagctgagtcctctgaaagaaaatcagaatgttgcatgcatctgtattttttgtcttagatttcacttgattctcaaatggatccttgactcccccaaagtttaatttattcaacaaatcttttttttcctccatactttttattctgaaacatattcccccaatttttaacttctgaaaaatttcagacaagttattggaatagggtagtgagtatctatgaacctttcatataggtttactttaaaaaaaatacaagagacagggtcttgctctgtggcccaggctagagtgcaatgttgtgatcatagctcactgtggcttcaaacccctgggctcaggcgatcctccctcctcagcctcctgaatagctgagactacaggcatgcactgtcatgcctggctaattgtttaaatcttttttagagatgggatcttgctatgttgcccaggctggtcttgaactcttggcttcaagtgaacttcccaccttgacttcccaaggtgctgagattccaggcatgagccactacatctggcctgatgatgattgctaattgtaaattaaggcatgtggccccatagaaggttttgaatttggtgagctaattatctggtaaatttatcacgaagtaagttagtccactattgaaagaacctgtttttggccgggcacggtggctcacgcctgtaatcccagcactttgggaggccgaggcaggcggatcacgaggtcaggagatcgagaccatcctggctaacacggtgaaaccccgtctctactaaaaatataaaaaattagctgggcgtagtggcgggcgcctgtagtcccagctactcgggaggctgaggcaggagaatggcatgaaccctggaggcggagcttgcagtgagccgagattgcgccactgcactccagcctgggcgacagagccagactccgtctcaaagaaaaaaaaaaaagaaagaaagaacctgttttaggcagtgtggtcccttccccataaatagtcctggctgctcagggaggtgatgaactccccatcatggggagtattcaaggggtcactttccaaagaggccagaaacagggcctgcttcatgtgaggagttgcatatggctgttcctagctctgcccccttatgggctggcccgctgggatagcatctgccatgtggtccgccttctaggagctggtggagttttaccagcagaactctctaaaggattgcttcaagtctctggacaccaccttgcagttccccttcaaggagcctgaaaagagaaccatcagcaggccagcaggtaggaggtctcagactgggggcttacagcctcagccccttcccattgtggagggaaactttggggatgccattgacaccccttccaatggccttgcagaggtcatatctgtgcagtagcaggaacccctttccactcctgtctatcccttcctatatatattttaatataatataatttaattaattaatttatttattttttgagacagagtctcactctgttgcctaagctggagtgcagtggtgcgatcttagctccctgcaacctttgcctcccacctcttgggttcgagggattctcatgcctcagcctcaaaataaaaaaataaaaataaaaattccaaaccagtcttattttctggctgggtgcggtggctcatgcctgtaactccagcacttcgggaggccaaggtgggtggatcacttgaggttaggagttcaagaccagcctggccaacatggtgaaactccatctctactaaaaaaaaaaaacataaaaatcagccgggcatggtggcacaggcctgtaatccccgtgattcaggaggctgaggcaggagaatcacttgaacccaggaggcataggttgcagtgagctgagattgtgccaccgcactccagtctgggtgacagagagagactttatctcaaaaaaaaaaaaaagtgttattttctaaattcagacgggaggatgatgctgggagtacaattgtgtccccttacagtacagggcatctaatactctgcagaaaagagcactgaggagccctttatcctggagttactgtcctgagagcttgtgcccccagagagtgagtgggtatctgccccagacccttttctcacttctgttctctctccacagtgggaagcacaaagtattttggcacagccaaagcccgctatgacttctgcgcccgagaccgatcagagctgtcgctcaaggagggtgacatcatcaagatccttaacaagaagggacagcaaggctggtggcgaggggagatctatggccgggtgaggcaggcagggctgggtgacggggagggcatgggggttgagctggtggtggacgagactggaactggggactggagaaggtgaggtgcggctcccatggagatctctcacggtgggagggaaggaagggacacagggatgtcatttatgcatttatgcaacctacctgcatgtattcagcacctgctgtgtgcagacattgtgctgggtgtcgaggagacagaaacaagcacggtacaaggattgccctcatgaaacttataatcgaatgtggaggacagacctataaccaagcagtcatgacactgagtggtcaagactaacaagggtgccagtcacggtggctcatgcctgtaatcccagtgctttgggaggctgaggtgggaggatctcttgaggccacaaattcaaggcaagcctggctaaaatagtgagatcccacctctacataaataaaaataaaaacaaaaacattagttgggcgtggtagtgtgtcccaggtactcaggaagctgaggtgggaggattgcttgagtccaggagttggatgctgcagtgagctatgattgtgccactgcagcctgggtgacagaacaagaccctgtctttaaaaaaaagaagaaagaataaaagagattgtggtggagaatcacagggcagcgtgggagcactgagggagcccctgacccaccctaggagtggatcaggatgacttctgaaaggccaaactgattaataagggataaataaagtcatgcaaatgaaaaggttgtatatgtgttgggggaaagcattccagacagaaggaccagtgtgtgcaaaggccctggggtgagaggtgcctaatcagtactgaatatacaaagaggtagagctgggactaaaccactgtgctcactttgcctgcttgaattccgattccaaggagtggaatagacttcaaatgtcttcaagtccacttgtttctgccaagttctcatttttgttccatgaaggcagagcaccttctttatttcatccactgatgacttctcagcctctagaattctgccttatgatggatttctcagaaatatgtttgtgtaatgaagacaaggacagtggttagagtttacattctactggggaaaatatacacaaaaaatgatgtggataattgcatcgatgaggagttttgttaaaacattggagggtcagtttaatgagcagtggaggacaattaggctttgagagaggcttttggagcattgaggaaggattgggatgtaaaggattcatccatccatccatccatccatctatccatccatccatctatccatctatctatccacaaatcatccattcatctgtgcatccatccatcttagcctatgcatccatccatttcaacctacgcatctatccattcatccacccacccttccactcacgcatctatctaaccatctatccacctacccacccattaaaacattaatctatccattaatccaccatccagccaacatctattcatccatttctatctgtgcatccatccatctatccatgcatgcacccatctgttaatctatctctatatttatccatccatacacctactcaccagtccattaattcatccatccatccatccgaccaccatccactcacccttccaatcaccattcaccaacccaagtatccatccacccattcatctatctatctatctatctatctatctatctatctatctatccattcattatctatctacctatctatccacctacccatcaatccaataatccatccattcatctatccatccagccaaaaaatattcagtaagtatctactgtgtgccaggaactgttctaggctcttgggattcagtgacaaataatacagacaaaaatccctgctggccaggcgtggtggcttatgcctgtaatcccagcactttgggatgccaaggtgggtggatcagttgaggagaggagtttgagacccgcctggccaacatggcgaaaccctgtcttaactaaagatacaaaaaaattagctgggcattgtggcgtgcgcctctaatcccaggtactcgttaagctgaggcaggagaatcgcttgaacccaggaggcggaggctgtggtgagctgagatcgcgccactgcactccagcctgggcaacagagtaagactgtgtctcaaaaaaaaaaaaaattctgccttgtagagctcacattgcagttgcagggaggggaacagacaaaaagcttgtaaataagcaaatgatacataatgaatcagacggtgatatgtgctatagaaaaagataaagcaagacaaggggtccaggcacggtggctcatgcctgtaatcccagcactctgggaggccgagatgggcagatcaccggaggtcaggagtttgaaaccagcccggccaacatggtgaaaccccgtctctactaaaaatacaaaaaaattagccgggtgtggtggcaggcgcctgtaatcccagctactcgggatgctgaggcaggagaatcacttgaacccgggaggtggaggttgcaataagctgagattgcgccattgcactccagcctagggggcagagtgagactctgtctcaaaaaagaaaaaaaaaaaaaaaagaaaagaaaagaaaaagaaaaggggctaaggagtgttggggtgggtggagcttgcaattttgaatagtatggctaggaaggtcttgctgataaagtgccatttagggagggacttttaggaggtaatgggtgtgtgtgtgtgtgtgtgtggtcagccttgtgtacgttgggtgatgtgttttctgggatagacagaaggaagagcaggtgcaaaggccctgaggtgggagggagcctgcctggtgtgtggaggggcagtaggaggatgtgcagaggttgcactgatgaactcctcgtctgtttccaggttggctggttccctgccaactacgtggaggaagattattctgaatactgctgagccctggtgccttggcagagagacgagaaactccaggctctgagcccggcgtgggcaggcagcggagccaggggctgtgacagctcccggcgggtggagactttgggatggactggaggaggccagcgtccagctggcggtgctcccgggatgtgccctgacatggttaatttataacaccccgatttcctcttgggtcccctcaagcagacggggctcaagggggttacatttaataaaaggatgaagatggatagaaggactggtgtcgttcagaaggacctgctaggagagagatggggagagagtgtgccacactgacaaagccccctcaccaatccacagacaaagcccccttaccaaccacagacaaagccccctcaacaatccacagacaaagccccctcaacaatccacagacaaagccccctcaccaatcacagacaaagcccctcaccaatccacagacaaagccctctcaccaatttctgtctcctaacttgattgctgttctctgtcatctattaatacaatacaacttgaatctgggatatgaaattccctcttttgggctgggcatggtggctcatgcctgtaatcccagcactttgggaggctgaggtgggcagattacctgaggtcaggagttcaagaccagcctggccaacatggcaaaaccccgtctctactaaaaatacaaaaactagccagtgcctataatcccaactactcaggaggctgaggcagaagaatcccttgaacctgggaggcggaggttgcagtgagccaagatcgcaccactgcactccagcctgggcaacagagcgagattccgtctcaaaaataaataaataaataaaataaaataaagcaggaatttgctgggtgcagtagctcacgcttgtaatcccaacacttcaggagattgaagcgggtggatcacccgaggtcaggagttcaagaccagcctggccaacatggtgaaaccccgtctctactaaaaatacaaaaactagccgggcgtggtggcaggtgccagtaatcccagctgcttgggaggctgaggcaggagaatcgcttgaacccaggaggcagaggttactgtcagccgagatcatgacgctgtactccagcctgggtgacagagcaagaactctgtctcaaaaaataaaaataaataaagaaataaataaataaaagtgagaatttcttttcttttttttttttagtactcaaagatttttatactcaggaaagaattttatactcaaagattcaagatcacaaaaatgtaccgctcattcgtttttctttctttttaaattattttattttattttttcagggacagagtcttactctgttgcccagccgggggcacagtggcacgatcatagctcactgcagcctccacctcctggtgtcaagcgatcctcccacgtcagcctcccaagtagctgggactaaaagcaagcaccaccacacccggctaatattttattttttgtagggagggggtgttgctatgttggtcaggctggtcttgatctcatgggctcaagcagtcctctcaccttggcctcccaaagtgctgggattacaggtgtgagccactgcacctggcctcatttgtttttctttttgagacagagtcttgctctgttgcctgggctagagtgcagtggtgcaatcttggcttactgcaacctccgccccccaggttcaagtgattttcctgccttagtctcccgagtagctgggactacaggcacgcgccaccatgcccagctaattttttgtatttttagaagagacagggtttcaccatgttggccaggctggtctggaactcctgacctcaggtgatccacccgcctcggcctcccaaagtgctgggattacaggcgtgagccacctcacctggccattttttatttaatagtctttattaattattaaaattgcagtaaaatatacattacatgaaatttattttcttaagctttttttttttcttttttttttgagacggtgtcttgctctgtcacccaggctggagtgcagtggtgcggtctcagctcactgcaagctctgcctcctgggttcacgccattctcctgcttcagcctcccgagtagctgggactacaggcgcctgccaccacacccggctaattttttgtatttttagtagagacggggttttgccttgttagccaggatggtctcgatctcctgacctcgtgatgcacccgcctcggcctcccaaagtgctgggattacaggtatgagccaccacgcctggcattttttttttttttttttttgagatggtgtcttgctctgtcacccaggctggagtacagtggcgcaatctcggctcactgaaacctccgcctcctgggttcaagtgattctcctacctcagcctcccaagtagctgggattacaggcacccgccaccacacccggctcatttttgtagttttagtagaaacggggtttccccatgttggccaagatggtctcgatcttctgaccttgtgatcgaccagcctcggcctcccaaagtgctgggattataggcgtgagccactgcgcccagcccttagacttttaatgctcataaactaagattcaggatctccaaggaagattttgaagttcaaaagccagggaggctgagggcagaggattgcttcaggccaggagctcgagaccagcctgcacaaaatagtaagatcttcctctctacaaaaaaaaaaaataaataaaaaaataaaaaaaataaaaaaattagctctgcatggtggcacacaactgtagtcccagctactcaggaggctgaggtgggaggattgcttgagcccaggaggtggaggctgtggtgaactatgattgcaccactgcactccagcctaggcaacagagtgagacctcatctctaaaaaccaaccaggccagtcacagtggctcacgcctataatcccagcactttgggaggccgaggcgggcagatcacttgaggtcaggagtttgagaccagcctggccaacatggtgaaatctcatctctactaaaaatacaaaaattagccgggcgtggtggcaggtacctgtaatcccagctacttgggaggctgagataagagaatcacttgaacctgggagggggacgttgcagtgagatgagactgcaccgctgcactccagcctgggtgacagagcaaaactccatctcaaacaaaaacaaaaacaaagaacaaaaaacaaaacaaagcaaagaaacaaccaagtaaccaactgaccaacaaaagccagggagttgctttttgggtaaatctgcaggctgctagcataacccttaggaggcaaaaagatgggctggcctaagctgacagggctggggaaggatcatgggctataaattaatttgggaaaaagtagttcatacttccaaatatattaccctaccatactactaacagaggcacctcccgtgtcaagtattcagtgttgtctggcgccatgaaagtaagcacttcctacacagtatctagattaatctcacagccagcttcgtggtattttatcttattttattatttattaatttatttttgagatggagtctagctctgtcgccaggctgcagtgcagtggtgcaatcttggctcactgcaacctccacctcccaagttcaagcgattctcctgcctcagcctcccgagtagctgggattacagacacacgccgccacacccagctaacagttgtatttttagtagagacacaggggtttcgccatgttggccaggatggtctcgatcttctgacctcgtgatctgcccacctcagcctcccagagtgctgggattacaggcgtgagccaactgcaaccggccgggtttctttttgttgttgttgttttttttgtttttgagacggagccttgctctgtcgcccaggctggagggcagtggcgcgatctcggctcactgcaagctccgcctcccgggttcacgccattctcctgcctcagcctctcgagtagctgggactacaggtgcccgccaccacgcccggctaattttttgcatttttagtagagatggggtttcatcgtgttagtcaggatggtcttgatctcctcgccttgtgatccgcccgcctcggcctcccaaagtgctgggattacagacgtgagccactgggcctggccagtttttatttttatatgaaatagagcatagtggtcagggctccaagagattctaaggtcctctgtgcccctgtgaaattagctataaagttttgggaaagacttcgcctctctgaaccagagaaagataaaatcagctcgccacaggcagagagtcggtatgcacctaagcacagaaccacgctcttaaccgtcactctagtgccgggtggggatcttggtatatcctagctctctctgcaaccccaggtaagccaacgcctagatggtacctgcacacacctggccaggtgcaggatatagcctctgaagcctggagtgaagtgtttttcatgtttgaggaaccatgaatctagaaatgggtgttggaggaagcaatgcagtcacaagggatcaggaactaggacggggggtttctgcccctcccgtgactcccccagagtcacaccatgaacctacctatggcctaaggtggctacctgggctgtctagttcagggtgttggtgaggttgaggtcatggacttgttcttggagttcctgggtggccctcaccttcagccccaggctgtgtgaatgactcaggcgcagacctgcctgaaaagcacgtataatccagtaggggacttaacaatcaaccaggcaattataacacagagttgatgaatttcataaggaacacaggtggctgtgggagcaaatacagatctaacccaggcttgagtaggggaggatggtcagggagggcttcctggaggaggaaacatctaaggtggcaactgtataatcagctggatggagtcacctagaaaataaatgaggggacagcctagcacggtggtccatgtctgtaatcccggcacttggggaggccgaggcggcggatcacttgaggtcaggagttcgagaccagactgggcaacatggtgaaacccccatctctactaaaaatacaaaaattagccggtgtggtggcaggtgcctgtaatcccagctactcgggaggctgaggtaggagaatcacttgaacctgggaggcagagattgcagtgagctgagattgcaccactgcaccccagcctggacgacagagtgagactcaataataataataataaataatgaagggaaagttttttagggagaggggcaaatgatagtgatcctggtaggttctggaaacttcaaggggctcattttgcttggagagggaggaaagtgggggtggggtgggtgaaaagttgttgggagaccgggcgtggtggctcatgcctataatcctagcactttgggaggccgaggcaggtggatcacttgagctcaggagttcgaaaccagcctggccaacatggtgaatgtacaacggacagcccccaatacagacagacagacacacacacacacacacacacacactcactcactcctacccccagccctaagaatttacaaacactgataaagacaaatgaaatcagcggatatagacttcaaacgccgtcagacagacacccactagatcaaacagggacattcctaaacatcacacagacacatcgccaggcagtcccaccgcagacagccacaaattaaagccgcgcttgccccctgatggacagcagcagtagtgcgccacctcgatagcgcaatctcccagagcgctggcattgcaggcgtgagccaacgtccgcagccaaacacgttcatattgttgagaaggcagagaaatacaaagtaggtggaagggtctccacctacagctgttttctgtggtctgaggattcttcccacgtctttaatttctagtgctttctaggggtctcaacttgaactatttaatattttctggaagagaaacattttttgtggggggggcgggtgggggtgggaccgagtctcgctcttgtctcccaggctggagcacagtggcgcgatcttggctcactgcaacctccgcctcccaggttcaagcgattttcctgcctcagcctcccgagtagctgagattacagcgcccagctaatttttgtatttttagtagagatggggtttcaccatgttggccaggctggtctcgaactcctaacctcaggtgattcgcccgcgtcggcttcccaaagtgctgggattacaggcgtgagccaccgcgcccggcccagaggaactttttttttttttttccagaggaacattttttatccaaaggaatgactccctaatggtggaattccaggcaatgaagtgaggcgcgaggcagattgtcacatagggagctgtcatatttcatgggtaccattcacgcaaggcgggacttgttcttaggcagccaacacttccgcattgtcctggcatttgagccgcggaaccaagttccgcgtatcttgcccattgtaaccccacagcaccaatttgaagctatgtagtgccctctggtggccttcggtgatttggcttcagtgtctcaaactctctgattagactgtttccaaagagaaggctgttagggggcctcagaagtcaggtttggatgtttgagctctaagctgcaggatttggggagccgtggtgtgggggtgatttatttatttatttttgagaaagagtctcactctgtcgcccaggctggagggcaatggtgtgatcttggctcactgcaacctccacctcccaggttcaagtgattctcctccctcagcctcccgagtagctgggactacaagagcccgacaccacgcccagctaatttttgtattttcttttgagtagagacggggtttcaccatgttggccaggctggtctcgaactcctgacctcaggttatccacctgccttggctttccaaagtgctgggattacaggtgtgaaccatgcctggccggagtggggatgattcaaacagtggatattcgcatagaatgtgcccattcctatggtgtaaatagtcccaccgcatctgatttcttttttcttcttttttttttgttttttgtttttttgtttttgagatagagtcttgctctgttgcccaggctggaatgcagtggcacaatctcagctcactgcaacctccacctcctgggttccaagcagttctccctgcctccgctgcctgagtagctcgattacaagtgcccaccaccaagcccagctaacttttgtatttttagtagagatggggtttggctgtttgccaggctggtcttgaactcccgacctcagatgatttgcccgcctcggcctcttacagtgctgggattacaggtgtgggccaccgcacctggcccacagctgatttcaagtcatcataagtatcctcactttccttgcctccagtccacccagcaaaagcacaactaacatcagagagctcaggcacggggataaccataaggtcctatgtaatctgcatctcccttcctgccttggccatgctggccacaggcagcaggaaggggcagaggaaggagctgggcgaggatgtggcctcagctggagtttacttagagattagctccatggagaaaaataaagtggagtaacatgctagcaagtttttatttaaaactttaaaaataaaaaagtttttgaggccgggcatggtggctaatgcctgtaatcccagcactccgggaggccgaggcaggcggatcacaagggcaggagatcgagaccatcctggctaacacggtgaaaccccgtctctactaaaaatataaaaaattagccggacatggtggcaggcgcctatagtcccaactattcgggcagctgaggcaggagaatggcgtgaacccgggaggcggagcttgcagtgagccgagatcgcaccactgcactccagcctgggcattacagtgagactgtctcaaaaaaaaaaaaaaaaaaagaaaagtaaaaaaagaacagaatgctttggcatatttaaaaatggttcctgccgggcacagtggctcatgcctgtaatcccagcactttgggaggctgaggcgggtggattacgaggtcaggagatcgagaccatcctggctaacacggagaaaccccgtctctactaaaatagtacaaaaaaattagccaggcgtggtggcgggcgcctgtagtcccagctactcgggaggctgaggcaggagaatggcgtgaacccaggagacggagcttgcagtgagccgagatcgtcccactgcaccccagcctgggcgacagagcgagactctgcctcaaaaaaagaaagaaagaaagaaagaaagaaagaaagaaagaaatctagccccttcctcagggccgagagaattttgagcactagccttctctcggtcgcctgaattcatctcagagtgtggcatttctctgcaactcactcggttacaacacggggtgtggattattcaggagtgttctgggaaggggttgaggattttccagaactaagggttcctcgcctttctagactctctaggatagcttccggacattgccatggcatctgtaaactgtcatggcgcttgcgggagtttcttttagcagctaatacatgataattagtgtataataagaatgaacaatgaggacaaccacaggtcagttttgtcgccatcttggttttggtgggatttgggctggcttctctaccgcagcctgtttaatcagtagggtctttatgacctgtatcttgtgtcgacctcctatctcatcctgtgactaagaatgcctgatctcccgggaatgcccagcaggtcgcagcctcatgttacccagctcctgttcaagatggagtcacactggttcaaactcctctgacaagtttgtaaaacttatgaaactgcgggggctgccctaagacttctgcacactgagtcttgagcgattcgtcaattaccgttcaggtttttctaccccggtactggttcctgaggtgttttctgctccagtaaaccgacactctctctctgactctccaattcataacaaaacatttcatgacacgaaacacaaacatacataaaatgtactttttttttttttgagatggaatctcactctgtcacccaggctggagtgcagtggcgggatctcagctcactgcaacctctgcctcccgggttcaagcaattctcctgcctcagcctcctgagtagctgagattacaggcacgtgccactatgcctggctaattttttgtacttttagtagagacgggtttcaccatgttggtcaggctggtctcgaactcctgacctcatgatccacctgcctcagcctcccaaagtgctgggattacaggcgtgagccaccatgcccagcaaaatgtacctcttttaccattttctttttttgagataggatcttgctctgttgcctgggctagagtgtagtggcacgatcacagttcacttcaggctcaacctcaccaggctcaagcgatcctcctccgtcagcctcctgagtagcttggattacaggcaccagacaccacacccagggcagctgtttgccctgtgtccttgtaactacccagtgggttcaccttgctctccgcctagacagagtcaatttctcaagacaggaattgcagtagagaaagagtaattcacacagagccggctgtgtgggagactggagttttattaatcaaatcagtctccttgagctttctgggagcagagcttttaaggacaacttggtgggttgggagaagccagcgagccaggagtgctgatcggtcatggatgaaatcacagggagtcaaagctgtcttcttgcactgagtcagttcctggtgggggaccacaagatctcatgagccagtttatcaatctgggtggtgccagctgatccatcaagtgcagggtttgcaaaatatctcaagccctgatcttaggagcaatttagggagggtcagaatcttttagcctctagctgcatgcctcctaaaccatcatttctaatcttggggctaatttgttagtcctacaaaggcagtctagtgcccaaacaagaaggaggtttgttttgggaaagggctgttatcgtctttgttttaaactataaagttcctcccaaggttacttccgcctatgcccaagaatgaacaaggacagcttggaggttagaagcaagatggaggccaggcgcggtggctcacgcctgtaatcctaacactttgggaggccaaggcaggtggatcacctgaggttgggatttcgagaccagcctgaccaacatggtgaggtgagaggatggcttcagcacaggaggctgaggctgcagtgagctatgattgtaccattgcactccagcctgggcaacagagcaagaccctcatcccaaaacaaaagcaaaaataataataataataaaccccaaccctcacccagtctgtagtacttagttatggcattcctaacagaccaatacagtgaaactaggtctatcgccagaaaagcccattctgtgggctaacagaatatattgtcccttatttttttattttttttgacagagtatcgctctgtcacccaggttggagtgcagtggtgtgatcttggctcactgcaacctccacctcctgggttcaagcaattcttctgccttagcctcctgagtagctgggattacaggcatccaccaccatgcctggctaatttctgtatttttagtagagatgtgttgtcaccacattggccaggctggccttgaactcctgacctgtgatccgcccacctcagcctcccaaagtgctgggattacaggcatgagccaccgtgcccagtctattgcccgttatttaggctgtatctttgtgtagctcctccacttcccagaaccctctatcttctcagaggcttaggcctggagatccattttctttctctagattctttgagacccacttccttcaaattcagctccccgtctgcctggtctcaggggccctatctttggggatgaataagatgatttattatttttttcttcagtcattttgcactttcacatattcttctgggtcatcttctcataatgtccaaagacagtctagactatcagttcctctagctggttcttctgccccctgtgagatgcaaggataagtaaaaccattcggggaactggcttggagctcagccagaaacccttgcagaaattggcagagggagaatctgtgcacagcaacgcttgcagacgttaggtgtcccttgcaaagggagtggataaacacacagctgcccactgtgtaagttcaccagcctgtgccccgagctctaaacaggactggggaaaggtttccaagatgtatttcttatcagcagcctgcagttaggaaacaaaaattgcaacagtttttgttgctttattttagtttttaaggaagtatatggttagattgttgctaaggtttataaggtcatatgtctttttctttttttcttttttcttttttgagatggagtattgctctgttgcccaggctggagtgcagtggcatgatctcagctcactgcaacctccacctctggggttcaagcaattctcttgcctcagcctcctgagtagctgggattacaggtatgcaccaccacactcggctaatttttgtatttttagcagagacagagctccaccatgttggccaggctggtctcgaactgtgggcggaggattacctatgtgccgagtcaagagactgaaggcacaaactgtttcagtataataaagaaaatagttagaatagtcataatacaagttagatatagagatgatcatgaacagttattaatcattattataaacattaatcattagcttttaatattactctttgttgcattactaatataacctaggaataaccggcggatatagggtcaggtgctgaagggacattgtgagaagtgacctagaaggcaagaggtgagccctctgacatgcccgcataagggctgcttgagggctccttggtcaagcggtaacgccagtgtctgggaaggcacccgttacttggcagaccgcgaaagggagtctcctttccttggaggagtcagggaacgctctgctccaccagcttcttgtggaaggctggatattatccaggcctgcccgcagtcatccgggggcctaaacccctccctgtggtgctgtgcttcagtggtcactctccttgtccactttcatgctcctccagtactcctggttcctctttgaagttcacagtagatagtggtagcagaaatagtgaaagtcttaaagtctttgatctttcttattagtgcagagaagaaaacgctgacgtatgctgccttctctctctgctacctaaaaggtaagggccccctatcctgtcatcatcctgtaatcacgtgacttgcctcaccttgtcgatcacttagaagattcaccctccttaccctgcccccttgtcttgtatgcggtaaatatccgcgtgcgcagctgttccgggctactaccagtctccgcatcttgatggtagtggtcccccgggcccagctgctttctctttatctctttatcttgtgtctttatttattacaatctctcatctccgcacacggggagaacacccgctaagccccatagggctggaccctacattgaactcctgacctcaggtgattcacccgcctcggcctccgaaagtgctgggattacaggcgtgagccaccgcacgcggctggtcacatgtcttcaacattgtgcaatgagatcaactctatattaaaagaaatttaagagatcacatttcattggagatgtacaaaaccaatgtcattaggtccctttatatggcacacacaataaaacaatttgattcctccatttagcaggcagcataaaataatttggttgctttgtagaacatgcactgacgaataacgtggtcccctcatgcagaatgcaccataaaataattggacaggatggtgggtgctgttttattttggggcctattttatcaacttcattgaggaataatttgtgtacaacaaatggcatgctttggcagtgtacaatgtgatgttttgacaagcactgttaacaatgctacagtaaaaatatggatcagtccgggcacggtggttcatgcctgtaatcccagcactttgggaggccaaggtgggcagatcgtttgaggtcaggagttggagacgagcttggccaacatggtgaaaccccgtctcgactaaaaatacaaaaattagctgggcatggtggtgcgcgcttgtaatcccagctacttgggaggctgaggcaggagaattgcttgaacccaggaggcagaggttgcagtgagccgagattgcaccactgcactccagcctaggcaacagaataagactccatcttaaagaatatacatagatcatttccatcattcccctaagtcccctgggaccctcttgtaattcatccttccctccaccccggccctaggtaaccactgatttgctttctctacccctaaccatatatggtttgtgttttctagaatttcaaatacatagagtggttaattttatatgtcaacttgtctagactgtgggaaggtatttttaagctatgattaatgtttatagtcagttgactttcagtaaattagatgactctctataaagtaagtgggccacttctaatcaattgaattccttaggagcaaagataggtttcccgaagaagaaggaattctgacttcagactttaacatagagatatagaaattctgcctgtgaattgcaacaaaagcaaaaattgaccaatgggatctaattaaactaaagagtttctgcacagcaaaagaaactgtcatcagagtgaacaggcaatggccggacctggtgactcacgcctgtagtcccagcactttgggaggctgaggagagtggatcatgaggtcaagagtttgagaccagcctggccaacatggtgaaaccctgtctttactaaaaatataaaaattagcggggcgtggtggtgggtgcctgtaatcccagctacatgggaggctgaggcaggagaattgcttgaagctgggagaaggaggttgcagtgagccgagattatgccactgcactccagcctgggtgacagagcaagactccatctcaaacaaacaaaaaattaactgggcatgatggcacatgcctgtagtcctagctactggggtggctgaggtgggaggatcactagagcccaggaggctgaggctgcagtgccgagattgtgccactgcactccagcctgggcaacagagcaagactctgtctcaaaaaacaaaacaaaacaaaaacaaaagcaacaaacaaacaaaaaacgagtgaacaggcaacctacagagtgggagaaaatctttgcaatttatccatctgacagaggtcgaatatccagaatctacaagaaactcaaacaaatttacaagaaaaagacaaacaacaccattgaaaagtgggcaaaggacatgaacagacacttctcaaaagaagacattcatgcagtcaacaaaaatatgaagaaaagctcaacatcaatgatcattagagaaatgcaaattgaaaccacaatgagataccatctcatgccagtcagaatgaccactattaaagagtcaagaaacaatagatgctggcgaggtggcagagaaataggaatgtttttacactgttggtgggaaagtacatcagttcagcccttgtggaagatggtgtggtgattcttcaaagatctagaaccggaaataccatttggcccaacaatcccattactgcaaatatacccaaaggaatataaatgatactattacaaagatacatgtatgtgtactttcattgcagcactactcacatagcaaggacatggaatctacccaaatgcccatcaatgatagactggattaagaaaatgtggtacatatataccatggaatactatgcagccataaaaaggaatgagatcgtgtcctttgcagggacacggatgaagctggaaggcattatcctcagcaaactaacgcaagaacagaaaaccaaataccacatgttctcacttatagtgggagctgaaaaatgagaacatatggacacagggaggggaacaacacacactgaggcctgtcagggggtggggttgggagagggaaagtattaggaaaaatagtgaactcatgttgggcttaatacctaggcgacagattgatagctgcagcaaaccaccatggcacatgtctacctgtgtaacaaacttgcacatcctgcacatgtaccccagaactaaaaatacacatttaaaaatgtttttaaaaagaaacaaggctgggtgcggtggctcacacctgtaatcccagcacgttgagaggccgaggtgggtggatcacctgaggtcaggagttcaagatcagcctggccaacatggtgaaaccccatctctaccaaaaatacaaaattagctgggtatggtggcacatgcctgtagtcccagctactcgggaggctgaggcaggagaattgcttgaacccgggaggcggaggttgcggtgagccgagatcacgccatggcactccagcctgggcaacccaagagtgaaattccctctcggggaaaaaaaaaaaaagaaaaagaaacaaagctgggtgtggtggctcacgcctgtaatcccagcactttgggaagccaaggtgggtggatcaccttgaggtcaggagttcgagaccagcctggccaacatggtgaaaccccatttttaatctctactaaaaatacaaaagttagccgggcgtggtggtgcatgcttgtaatcccggctattcaggaggctgaggcgagagaatcgcttgaacccaggaggcagaggttgcagtgagccaagattgcgccattgcactccagcctgggtgacagagtgagactctgtctcaaaaaataaataaaataaaataaaataaattttaaaagaagaaagacattttgcctgtgctttaagcctttgggcccaagactgcagtatcacctcttacctgaatctgcagcctgtcagattgccttagggatttcggacttgtaacccctacaatcccgtgagccagttccttaaaatcactctctctctctttctgactctctgtctccctctctctgtctctctgtttctcctcttagttttgtttctctggagaatcttggataatacaagatccttttagtttattccctctttgtgtctggcttcttttctgtcttttttcaaaaatttgcatgaatgtatgaggtacaagtccagttttggtacatggattactgcttagtggtgaagtctgggcttttagtgtagccatcacccgagccatgtacattgaacccactaagtaatttctcatccctcactccccttccacccttccaagtccccagtgtctattattctacactctacgtccatgtgcacgcattatttagctcctatttataagtgagactatgtggatttgactttctgtttctgagttgttttatttaagataacggccttcagttccatccaggtgttaccaaagacatgatctcattcttttttatggctgagtagtattccacagttcatatatgtggggggttcagtcagagtggttggaaaaactataaggaaaggactcaaaccttctgaaagtttggaaggttctgcagagccccgggggaggaatagctgaaggcagctgttctataaccctgaggcagagggcaaggagtaggtacaagggagtgtgggcgaatttatcttaagcaggcctgtttacttacgttgaccaggaactgacttttgatcatctgcctatgtgatgttccctgaaaggggagcaataaatgttaattacctacaggttgtgtgtactccatgtttttggcattgtgcccacactgaacaaatgcaagcagctccagcttctcggggctgctctctggccgctagagccaggcagtcacctggctgctcttacactgcatacctgtgtctgactactcatttcatcccatcggccagggtctgcgggacagacccagtacacatacaccacattttctttatccagttgtctgtagataagacacttggactgatttcatatctttgctcttgtgaatagtgctgtgataaacctacaagtgtgggtatttttttgagaaaatgatttcttttcatctgggtagagtgggactgtcagaacgccttctcaatttttttctttttttagagatggggtcttcctctgtcactcaggctggagtgcaggggtgcaatcatggctcactgcagcctcaaattcctgggctcaagcgatcctcctacctcagcctcccaagtagctgggactacagacttgtagtaatttttgtatttttagtagagacggggtttcaccatgttggtcaggctagtctcaaactcctgacctcaagtgatctacccacctcggcctcccaaagtgctgggattacaggcatgagccatcacacctggctccctcttctgactttttgctctgtatcctttcactgtaacaaatcataaccattagcaagactatatgctgagtcttcttagagaatcattgagcttggggaggggggtctccgggacgcctgataaaccacccctacctttaaagaaagagccttaggagccatagataaaccatgaagtctttggaggacaatgaagtctttgcatccacctccctcttagaaaccctgattcttttctcctgcaaaagggcagctgctgttcatttctcaccccctcaagaattgtggtcttccttctggggaagcggggtagggatgcaaagttcagtagattcatctatttctcttcccttctttttcctcatttgtttctttattttctaggatacaacagccaatgaaattctttccctgccctgagaaaatgctcagttttttgagggaaacagacattcaagcaagcatagataatactgactatggtgatggggggggaggatggaggaggcgcctcactctcaagtggaagtcaaggaaggcttcctggaggaggtgatatttacacagaaaggttgtataggattggggtgaatgtgcatttcagacttggtgtcaagagagaactgggtttggtggcacatgcctgtaatcccagcactttgggaggctgaggcaggaggatcgtttgagcccaggagtttgagaccagcctgggcaataaagcaagatctcatctctaaaagagaaaaaaaaaaattagcagggtatggtagggtatgcttgtggtctcagctatttaggaggctgaggtgggaggattgcttgaattcaggcagttgaggctgcagtgagctgtgactgagccgttgcactccagcctgggcaacagagcaagtccctgtctcaaaaaaaagaaaagaaaaagagagagagtttgaagtagaacttgctgtgaggtttcttgtgcacaggtgtttttgagggagaagatcaggacagagcaagggaatgagctaagcaaggaagtggtcttagctggagtccagccttagccggatcccatggggagccctggagtgtgactggtgccaccaggttggtctcaccctgggggcatggggctggccttctgcacctctgtgaccatccgttatggctgtgggctgggtctgagggtttgcacagttgctcagctgaggagaagggggaagctgtgagctatgagctattgtaggcagcactcactcacagcagccccaggatgggtgcaccagcctgggaaaggtcagtgagcagagcgttgactgcacccacaacagggacttcaagtattttataatcactggggggctttttgttgttgtttttttgagacagggtctcactctgttgcccaggctggagtgtactggtgccatcacggctcactgtgaccttgacctcctgggctcaagcaatcctcccgagtagctgggactacaggcatacaccactaggcctggcttattaaaaattttcttttatagagatggggtttctccatgttgctcaagctggccttgaactcctgggctcaaacagtcctcccaccttggcctcctgagtagctgggaccacaggtgtgcaccagccactatgcccaactaattaaaaaaaaatttttttctgtagattcaggatctcagtatgttgccttgaactcctgggctcaagcgatcctcctgccttgatttcccaaagtggtgggattacaggcatgagccactgtgtctagctgatcactagggctttagggggagtggagatcaataaaacaagatggggagaccagagtcagactacgtagagccttgagtgccatattaataagcctgaacttcatcctgagggcaatagggagccatggaagggtttagagtctaagcagggcgtggacaggttaggcagggattccccaacttccctgccccttcccggcactctgtgtgacggtaagtgatgttcctgcagctccccaggctgatttcttcaatcttgagagtcccttgtattcccctttgctagggaagtcattaggggttagattttgtaagcttcttggccagaattgttgatttcctcttccacatctttccccttcctgttcttacacccccacccgcaactctgcagggccgctgcaggacagtctttatatagcttcggtcacctctgtgggtttgaagggtgtctggagtcttgggttttcagtgtctcactaggacccgataccctgcctgtggtaggtgggataaagggcctcctctccctccacgaggcacctacagcctaatccctaaagcccaaggatgtgttcccttctatgacaaaagggacttttgcagatgggattcagttaagggctatttttttgggggggaggtggggggagtggggacagagtcttactctgctgcccaggctggagtgcaatggcacgatctcagctcactgcaacctctgcctaatgtcattacaagaattcttacgagaaggagacaggaggatcagggagagagagagagatggagagatagagatacacagagagtgagagagagagaaagaatgagagagaacgagagagagagagagagaacaagagcaataaggagagtgaacaagacagacagaatgggccaggcgcagtggctcgcgcctgtaattccagcactttgggaggccgaggcgggcggatcacttgaggtcaggagattaaggccagtctagtcaatatggtgaaaccccatctctactaaaaatacaaaagttagccaggtatggtggcagatgcctgtaatcccagctactcgggaggctgaagcaggagaatcgcttgaacccgagagacggaggttgcagtgagccgagatcgtaccactgcactccagcctgggtgacagactgagactctgtctcaaaaaaaaaggagaaaaaaaaaagagagaatgaaagagcaagagggagggaaaaatgagagaataagcaagagagagaacttgagagagagacagacagagaaaaagagagagaatgagagagcaagagagagggaaaatgagagagagagagagagcaagaacgagagatttagagtacgcaagagacatttgaaactgctagctgctggctttgcataggaaggaagggaccatgagccagggcatgtgggttgcctccagaagccagaaaggacaaggaatggattctgccctggagcctcgggaaggattgcagccctgctggcatcttggttttagtcccatgagactcgagaggactctgacctctggacccatcatatactaaatctgtgttttccccaagctgccaggtccgtggcaagcctcatcccatccccatccccagaagggatctgggtttgattgcaaaaccttccaactctttagcccagcctccaaatgtcgaatccttcttctgtctcaaactcccctgctacatctagacagtccccaaattcggttgttcctgcctcctaaattctccgtcactatagcccctgccccagaccaggccactgttctcttctctctcctggctgtatccccagcctcctccctatctgcccacctgtgaacccatcctgtccaatacccacctacaaaacacaaacataaaattccaacctgagcctgtggctcctttgctgaacctccttttattgccccgagggtaaagcctaaactctttcacccaccttataaggttctgtctgatatgaaatttgctggcttctccaattcaaattttgctggtatcaggattttttctatgagtagctgcaactatttagcatggtggaataataataataccaataataactaatagtatttaagcatttaatctgtgccaggcacagttttattattgtatcaccttaaccctcaaactccatgaagttagaccctttatttatttatttatttatttatttttgagacagagtctcgctctgtcacccaggctggagtgcagtggtgtcatcttggctcactgcaacctccgcctcccagattcaagtgagtctcctgcctcagcctcccgggtaactggaactacaggcgtgtgcccccatgcctgcatagttttttgtatttttagtagagacggggttttaccatgttagccgggctggtctcaatctcctgacctcatgatccacccgccttggcctcccaaagtactgggattacaggcatgagccaccacacctggccctagttagacacattattaccctcattttattaatggtgaaaactgcttcttaggtgtattggttatctcttgctgtgtatcaaattactccaaaacttagcagcttaaaatagggaacttttagtctcttacagtttctgaggatcaggagtctgggggtggctgagctgaataattctggctcaagctcttgcttgaggttatagtcaagccattgaccagggctggctcatctgaaagttcgactggggtgggaagatttgcttccaaggcagctcactcacatgactgttggtgggaggctcagttcctccacagcactgcttgaatctccttacaacatggcgactggctactccccagtgcatgaccctggaaagagagagcaacgaggatgccacaatggcacgtatgacctagtcacaaactgtcatgtgctcctttttctgatcaatagaaacaagtcacactgggcatagtgtctcatacgtgtaatcccagcactttgggaggctgaggcaggaagaccacttgggcccagagttcaagaccagcctgggcaacatagcaagatcctatctctgcaaacaaacaaaaagtcagctgggtgtggtggcacatgcttgtcatcccagctacttgggaggctcatgtaggaggatcacttgagcccaggacttggaggctgcaatgagctatgatcatgccactgtactccagcctgggcaacagagcaaaattctgtcttaaaaaaaaaagagagagagagagagagagagaaacaagtcactaagtctatgttcaaggagagagggattagtctctaccacctgaagagtatgaaagaactgatggatatgttaaaaccaccacattggtcttcctgcctctagagtccacactcctggatacactgaacaaggattataggagaaagtgcaagcctctggcagtcacttctagtagataacattacctgaaagggaattatggggggaggaggagagcgaggaccaatatcaccaggggatgggaggtgggaggggagagctacatctgtggtctctgcagagcagacacttttccagggaaacccttttctttctaatctttgtgagtcccccagtggatatttgtgtatctgagacctatgagatactcgtcctatgagacctcataggacgctgagaccccacattcagcattctatgatcaggagcatatggagaagatgtgggtgcagagacattgctcaaagaatacaaagtttcagttgaacaagaggaatatgttcgagagatctattgtacaacatggtgactgtagttaataacaatgaacaatgtagcatatccttgaaaattgctaagagggtagatgtaactattcttaccacaaaaaaatgacgtgcatgcaaaggaacagataggtttattgcctcgatttagccattccaccacatatacgtatctcagaacaccatgttgtacaccataaatatatacaatttaatttgtcaattcaaaaaagaattttttttttttttttgacagagtcttgctctgtcgcccaggctggagtgcaatggtgcagtctaggctcactgcaacctctgcctcccaggttcaagcaattctcctgcctcagcctccatgtacctgagattacaggcacccaccagcacacccagctaatttttgtatttttagtagagacggggtttcaccatgttgaccaagctgatctcaaacccctgacttcgtgatccacccgcctcggcctctgaaagtgctgggattacaggtgtgagccactgtgcctggcccaaaaacggaaaagaaaaaaagagagcacatagacctcacatattaactaggggaaataagaagtcaaaataaaccaaggctcagaagccaacgaattagagctggtgtttctcataggtctcagacacccaaatatccacctgcaggcttttttttttctttttttttgagacagggtctcactctgtcacccaggctggagtgcagtggtacaatctcagctcactgcaaccttctcctcctcccgggtttaagcgattctcctgcttcagcctcccaagtagctgagactacaggtgtgcaccaccatgcctggctaacaaagattgtaaagaaaaggatttccctggacaagtgtctgctctgcagagaccacagatgtagctctccctgctcacctcccatcctctggtaacattagtcctcgctctccttctacccccagaattccctttcgggtaatgttatctactggaatggactgccagaggcttgcactttttcctataatcctggactctggatacagcgtggaacagaaaaatgtagaaggaagctgggtgcggtggctcacaccagcaatcccagcactttgggagggtatcgtgggaggattgattgagcccaggagttcaggaccagagaccagcctgggcaacattaccagactccatctctaccaaaaagtgttaaaaaaaaaattagccaggcatggtagcaggtgcctgtagtcctgctactcaggaggctgaggtgggaggactgctgaagcccaggagatggaggctgcagtaagctgtgattgcaccactgcactccagcctgggcaacagagcgagactctctaaaagaaataaaaattttttaaaaatttaaaaattacagagggggccgggcctggtggctcatgcctgtaatcctagcactttgggaggctgaggtgggtggatgacaaggtcaagagatagagaccatcctggccaacatggtgaaacccttctctactaaaaatacaaaaattagctgggcatggtggcatgtgcctttagtcccagctacttgggaggctgaggtgggagaattgcttgaacccaggaggcggaggttgcagtgagccgagatcgcgccactgcactccagcctggcaacagagcaagatttggtctcaaaaaacaaacgaaaaaattgcagagggaatcctagagctgtggaagtctggataggtgccctcttcagacagcagcttctttcaaacttaatgaggctttgcacatgctttattttatttttcttttgtattaccttttctgctaagtgtgattatctcctgctcattctccagggctaagcttagacgttagctcctttgggaggccattctctcaacccccaacctgggtcaggcctcctctggccaagtaatagcttcctcacctctggctttctgtatcttacaatggggaggacaatcctgtcttttccccagcaaccctggggtgttgggcgtgtggacatcatccatgcctgataacaataccaaccatctcaaccaagggaaatgagaagtcaaaagacaccaagagtcagaagccaacaagttagagctggtgtttctgtttatggagctcatggcaggcactcacctgccgcatatgctgagcggtttccagcatccctacatgctcaaggatcctgtgggacagggctgatcattatccctattctcctgataagagactgaggctcagagaggtgaatcacctcctgtggtcactttggaaataccttacagagtcaggatttgaacccatggctgtctgagttcagttcctgtcactgcaataaccaacacttggaacgttgggtgccaggctctgttcttggtatgccatatatactcactcctctgatgcccacaccaggtccatgaggcagatcctactcttttttttttgagacagagtcttgctctgtcacccaggctggagtgcagtggcacaatctcagctcactgcaacctccacctcccgggttcaagtgattctcctgccttggacttccaagtagctgggattacaggcacgtgtcaccacgcccagctaattttttgtagttttagttgagacgggatttcaccatgttggccaggctggtctcgaacttctgacctcaagtgatccacccgcctcccaaagtgttgggattacaggcatgagccactgctcctgggtgagatcctattcttaatgcgcccattttacagatgagaatatttgaggcaagcagtggaggtgggatttgaacctctggcaatatgtttccagagttcatctccagtgcttccggaaaccacaatgcagctctgtttgtaccccttcctggtggaatttactgtattttcatgctgactcttaagttcagcctctccaggcagtgtcccttattttccccttaagaaaaaaaaaaagtgcaactggctgtcagcacttacttaattttacataaacaccctttttggggctgaagcaaatctgacttcttttcttttttttttcttttagaaaaacacactttattcatatttctttggggttttgttttgttgttgttgttgtttttgtttgttttttgagaccaagtcttgctgtgtcacccaggctggagtacagtggtgcgatctcagctcactgcaacgtctgcctcccaggctcaagctattctcctgcctcagcctcccaagtagctgggactacaggtacgtaccaccatgccgggctaatttttgtatttttagtagagacagagtttcatcatgttggccaggctggtcttgaactcctagcctcaggtgatccacccacctcggccttccaaagtgctgggattacaggtgtgagccaccgtgcccagccaaatctgactgattttcaatgtgaaaataaaatataaaaacagttcttggagttatttctaaccagaactaacatcagaatcgtcaattttggaaaaattggattcatcagataaattttcagccaacaactgtttgagaatgatagtaacatcatgcgtaggaatgctacacttttctaggatctgacattttcagcaatcaagaattactgtattttgtaaaatatactatagtatatagtaaaaaataccatattttgtaaaatatagtaatctggaaatatccctactaaaaacagaacactataaatagaatcatgtcttttgttttcaaagttgatacactagagcaatgcaaaaataataataaaggtgagatatttcacggcaaagttatctctgggtaaatgctgcagccacaagcgccaccagctagtattcttggggccaacggggaaagaatgaaggcacaaacagaaagccactgatgaatctggctagacgcggtgtctcaggcctgtaatcccaacactttgggaggccaaggtgggaggatcacctgaggtcgggagttccagaccagcctggccaacatggtgaaacctcgtctctactaaaaatacaaaagttagctgggcatggtaatacacgcctgtaatcccagaaactactcgggaggcggaggttgcagtaagccaagatcacgccactgcactccagcctgggtgacagagcgagagtccatctcagaaaaaaaaataaaataaaataaaaaaagaaagccattggtgaatctttgttccagtgacaataactccaaagctggtagtttgctttgcaaagaacaaaaggggaaggcaaaaacacgtggagcttttctttctaagaattcggggatgttctatgcacctcctttgtaccttgtgacagctgctatcagtggctgcccacacccataacctaacaacacattaatatgccctagcttaacgctgatacgggagctagaaagaagttatttaggcagagagtgagggcaagagagtcctcggtaaggtttgccttttaataaaaagcagcccccaaatcatttattttattttatttttttttttttgagacagagtcttgctctgtcgctcaggctggagtacagcggcacaatctcggctcactgcaagctccgcctcccggattcaagcaattctcctgcctcagcctcccgagtagctgggattacaggcgcatgccaccatgcccggctaatttttgtatttttagtggagacggggtttcaccatgttggtcaggctggtctcaaactcctgaccttgtgatccacccgcctcggcctcccaaagcgctggaattacaggcgtgagccaccgcgcccggccaaataatttcttttctaaaaaagagcagtctgaaaaatcagccggcagacatagaaaagcaagctggaagcttgctcgggtgaatgccggcagctgtgccaatgggaataggctacctgggtgccaggcgtgttcaacatgcaggcttgctccatgttcccttttctttatcaaccacgtgtacggtaaaggaacaggcaacatggtcctggccaggtagagaccccatctgcataataaaatattagggtgggcagccagcttctttgtactctatgtaaacggcacacctggtccaactaatctttgggcccttatgtaaatcagatatcaccacctaaagctcatctataaaaccccgtgcatttcaccatgaaactggaagacccacttgggagccccctctctttgcaggagagagagcttttctctttctctcgcctattaaatttcttttctttctttctttttttttttttttttgagatggagtcttgctctgtcacccaggctggagttcaatggcacaatctcggctcactgcaacctctgcttcccgggttcaagcgattctcttgcctcagcctcctgagtagctggaattacaggcatgagccaccacacctggctaatttttgtatttttagtagagatggggtttcactatgttgcccaggctggtctcaaactcctgatcttaggtgatccacccgtctcagcctcccaaagtgctgggattacaggcatgagccactgtgctcggcctaaacctctgctctaaaagtaattttttgtgtgtctgcattttattttattttattttattttattttattttattttattttattttattttaagacagagtcccactctgttgcctaggctggagtgcagtggcacgatctcggctcactgcagcctccgcctcctgggttcaagcaattctctgcctcagcctccggagtagctgggattacaggtgcctaacaccataccacactggctgattttttgtatttttagtaaagacggggtttccccatcttggccaggctggtcttgaactcctgacctcgtaatccaccctcctcagtctcccaaagtgctgagattacaggtgtgagccacggtgcccggccatgtctgtattttctatttccttggtgtgaggcaatgaacctcgggtattaccccagatggatgacactgcttcaatatctgccagtcactacactttgttatcagtgggattacatcaactggagcccattctatctgcttggaggccaggcctgaagattcaaggggttgacaccctctaggagcaagcctcaagtcaacccatgactgacagtaggtgggatataaatacctcagctccctcacccctcggttggaataactgaagagtatgttccatgccgctccccagtcatccctggggaggttaagttccactttctcaccatgtaacttatttgaagacacacccagtattggctctttgcctttcctgattcactttctcctcccccagctggtgctttctggggccaccttcttgataaactacttttgctagaatccttgtctgagggtctgcccttgtgagaccctaagatgttaccagagagagttaggaagctgggaatggggtggaagtgttgctgtataatcgtcagacagagttgagatctgaaggaaaataagatggttaaagctcttgactctggaatcagagggtcctgggttcaaatctcaagtctgagagatcttggacaagttataactcctctgcaagtctcagtttccattttgttggtgaatagagggagggaggggaattcctactttacaaggttaacatgataatgaaattacactttgttgccaatgtgcctagcacactgcctggtacatgatggttgtgatggctgtctttatacgggagactgggaagagaccctaaaggctgagatttgcttcactggaggcaggaagcggaagctcctttattgggtgcaatgaaagaaggtgttgagagatgggagatagatgttgatgggaaagaaaaagggagagaccatgggaaggagagagagagagaatgatatacattaggcagattaacttctctttattgtgaagaaagggggaaattaggattttctaggctgtcttttagttgcagcaagtcagcaaaaagggctatgatgaccaggcagcattgagcaactctgactccgccttcccctcttcgcacaccttctggttactgaaaacccagcgttagtagaaaagtttcttttctttgaatgacagaactacagcataatgcgtggcttcaacctgctcctcttctggggtgagtgtgaggctgaatggggggctaggggaggcctggattggaaatagacttcaggagaaatgggagggccatggatggtccagccaagagatcataagtccagactggatgctgcaaacaccttcattcagggaacctttgacaaaattccatagctcagggaagtccatctgttaggatagatttttctctatagtcattcatttgacctgagcaagtcctgtgtgtcaggtgctgttctaggcactagaggatatagcagtgagaaaaaaagactaagttcctgcactcttgaggctgatattctagtgggtaggagcagacaggaaagaaggcacagatgatcatagcccacttagcactgctgtaacttctttaaacatagagtgtatccaattgtcacaacatttctatgacattgggtcattattagtcctattttgcaaatgagaaaactgaggcaaaagagataaaataattttcccaaggccacttagtcaataaggggtagaggcaggatttcaagccagacagtctgacttcagagtctgtaagcttttccactatactatgttgccccaaaaaataagtaaacataggaatttcaggtagtgataagtgctatgaaagaagttgttatagaatgtggtcgggagttatgttgaagggagaagtctggggttgaggaggggcagttcgagctgagtcctgaaggatgagatagacccttcctgtgctcttatttctctttcttcaggtgtcagtttgtctcagccttgtttatcttctgtgtttctggtttttcttctatgtcttgtgtgttttggtcattggatcaaatttaagaatggaggatattggggacatattctaagtagcaagtatgggtttcctctgctgttgaagagtggatctgaataccctattttaccaaggaggaaactgaggcacaaagagattaaataacttcctcaaggccacgcaatcattaattggtgaagccagatttttaaacctaagcactttgacttcagactttgtatgcctaaacagcatgctgaattacctctaaaataattaatgaatgagtagaagaatttttgttagtaataatagatagaatttgggagtttagatctgtgggacttgttgactggcaggctacattagaagaaataggtggcctgtggacatcaaatgtaggcatgcagagttgttattttggggtgttggcaatggtattaaccattaacactccctattctgccctgaagataatcagcaaagagttgtgataatgatagtgatgataatgatcatgatggtggtggttataatagtgatgatgaaaatggtgatgatgatggtgatggtgatgatgatgatgatgataatggtgatgatagtgataatgaagatgatggtgatgatgatggtgtgataatgaccatgaagatggtgatgatggtgatgatgataatggtgatgatagggataatgatgatgatggtggtgatgatggtgtgataatgacgatgaagatggtgatgttggtgattatggtggtgatgatgatgatggtggtgatggtgataatggtgatggtgatgatgataatggtgatgatggtgataataatgatgatgatgatggtgatgatgaagatgatgatggtgatgatgatagtgataatgatggcgataatgatgatggtgcaggagacctaaatgctgcagggctgcattgcctttaaacactaaaaaatgggcagggcgcagtggctcacgcttgtaatcccagcactttaggaggctgaggcaggcagatcatgaggtcaggagatcgagaccatcctggccaacatggagaaaccccgtttctactaaaaatgcaaaaattagctgggcgtggtggtgcgtgcttgtaatcccagctactcgggaggctgaggcaggagaatagcttgaaccagggagttggtggttgcagtgagcctagatcacgctactgcactccagcctggtgacagagtgagactccatctcaaaaaaaaaaaaaaaaaaaaaaaggaaagaaaaacgaattgccctaccctctcatgaaatgttaatactacagatatactgtatacctatatatgtattttctatatatacatatgtatcttatacataaaagagtaagcttaaaaagatctcttcctgagaaccaagtttgggtccttagaggatatatcaccccttttgagaatgcatgctttaatgtatgtttttgaaaatcagctagaacttttttttttagacagggtcacctaggctggagcgcagtggcatgatcttggctcactgcagtctctatctcctgggctcaagcaatccttccacctcagcctcctgagtagctggggctacaagttgtcaccaccacccagctaatttaaaaaattttttttttgtagagacaaagtctcactgtgttgtccaggccggtgtcaaactgctggtctcaagtgatcctcccaccttggcctcccgaagggctgggattataggtgtgcaccacagtgcttagcctggaactatttaatcaaaaagaaaaagaagataaagacagacaaaatgaaaagcaaaagcaaagtacagaaaaccaggaatggtcattgttaagcttatgcaaaatagtgtatgtttgttccttaactaggtttgtcatctagcctcttcaaacctatttctgtggggccaagccaggagtaattttgcaggttgagcccaaaaggtttttttttttttttttttttttggtggttcatggtgtttttcttttctttcttcacaggatgttgtgttatgcacagctgggaagggcacataagacccacacggaaaccaaacacaaagggtaagttggccagagagaatgcagatgcctgaaggggtagagaaagttttctccccggggaaacatcccaggaagctgagcctcatccagatgcttgctgggagctagttagcggcagagcaagggttaacatgcaagtctcctgattctcacttcaggctctttcctttgtgcttagaattgctgtgtgatctcagataagtcacataacctctctgaacttcagtttcccaagctgtgaaatacagataacaatagggatgttgtgaaactttaattcaaagaggtagctttggaaaccacctggtatgtagtatgagctttataaatggtagtgtagtgagagtagggatggaatttactcaaactacaactcaatgtgcaaaaaaaaagtgacttctttatgttttgttaaatactctcatctacataaactcttgctggataaaggaagaaagacattgtcagttcgtagttgttgatatggtttggctatgtcctcacccaaatctcaccttaaattgtaagaatccccacgtgtcaagggcggggccagttggagataattgaatcatgggggatggtttcccccatactgttctcgtggtagtgagtaagtctcacgagatctgatggttttataaatgggagatccccgcacaagctctcttgcctcctgccatgtaagtaagacataattttgctcctcatgattgtgaagcctccccagccatgtgcaacagtgagtcaaattaaacctcgttcccttataaattacctagtctcgggtatgtctttattagcagcatgaaaacagactaatacaactgttcccagtgtctctgtttcctggttcttctttgggcaacttagcaacttggtctatattgtgttaacagctcatctttcacattttttttttttttttgagatagattctcgctctgttgcccaggctggagtgcagtggtgcgatctcggttcactgcaagctccgccttccaggttcacgccattctcctgcctcagcctcccgagtagctgggactacaggcgcccgccaccacgcctggctaatttttttgtatttttagtagagacggggtttcactagaaaccaggctggtcttgaactccttaggtgatctgctcaccccagccttccgaagtgctgggattacaggcatgagccactgcgcctggcccctttgtaggactttttcaaaagggctttattgagatggttgggaaaattttctcaaggaagtgatgttccagtggacttaaaggatggatgaattgatgttacccaggcaaaggggcagggtgggatagggcatgtctggtggccagaacggtgggtgcaaaggtcctgaggttggaaagaatttggaggaccgagcgaaggtgagtgtgactgatgacacagggcaggagatgagatggggaggtggacaggtacctagtcccacaagaccgggttgttactctgaccttggtgggtttcagttgtgagggagagggctagtggaagagaatgatgggaaacttacagcattaagagaccacaagtgataaaatgccggaagtctgcatagagaaatgttgcctctacagatgaaagaggaagctggaaatgagaagagagataccatctgaggcctcatgcagggaagggaaataaacaaggcacattataggagcaaagaacgtagatctcaaaaccaaatgtgtaacaaaaacagggtgaataatgtcacaatcacgataatccattccttctgtttttatgatactttttagtttttccatactcctaattgatgttggcattatcgttggttcctctcttttcactcctcacatccaatccatcggcaaattttgttagtgttgctttaaaaaaatcctgaattgcattcccttcattgattccctctgggttgtatctactgacatctttcacctggacaagtgcagtcaccccctccttggtcagtttatttctgatcttctatagttcgtcttccaaccagtggccagaaggctcatgttaaaaccttatgttgtgtccctactctgctcgaaatcctcccatgactcccatctttctttgataaaaaacccaactccactattcacaatagtcaagatatggaatccacctcagtgtccgtcaacagatgaatggttgaactcaatgtggtctgcatacacaacggattgctattcggccataaaaagaatgacattccacaatttgcagcaacatggatgaaactggaggtcattaagtgaaacaaaccaggcacagaaagacaaatgtcacatgtcctgactcataggtagttgccctactgtgctactgagcactcgatctcattccttccatctaactgtggtttttgtaccaaccagtcaatccctctttatcccccttccccactatcctttccagcctctggtaattgtcattctgctctctacctccattagataatgatgatgatgatttttagctcccacgtaggaacgagaacatgcaatatttgtctttctgtgtctggtttatttcacttaacataatgtcctccagtcctccagttccatccatgtttctgcaaaggatgggatttcattctttctttctttttttattttttatttttttgagacggagttttgctcttgttgcccaggctggagtgcaatggcgcaatcttgggtcaccacaacctccgcctccccagttcaagtgattctcctgcctcagcctcctgagtagttgggattacaggcatgaaccaccatgcctggctaatttttttttatttttagtagagacgggggcttcttcatgttggtcaggctggtctcgaactcccgatctcaggtgatctgcccgccttggcctcccagtgtgctgggattacaggcgtgagccatcacgcctgcccgatttcattatttcttatggctgaatgatattctattgagtacatatacgacatcttcctcacccattcatccactgatagacacttaggttgattccatctcttgcatgtactttggattttgaaaggtctggctctgctgctctccagcagatgtggttgtgtgtctttgggtaagtcactcaacctctctgagtcatgttttattttcacatatgggtattgggaatggtgcccatttcctgtggctgctgtaacaaattgccacaaacttggtcgcttaaaacaaaaaaaacttacctatcattctggaggtcagaagtctgaaatgggtcccactgggctaaaatagaggcaatggcagggctgcgttccttctggatgctgtacggaagaactattttcttactttttcctgtatctagggtcaaccatgtttcttggctcatgtccccttcccccaacttcaaagccagcagtggctggccagctctttcttacatcacatcactctgacaatgcttttcttggtttcagctttcacttataaagactcttgtggttacattcattgcccctggatgatccaagataatatgcccatcttgagatcagcatgattagcaaccttaattccatctgcaaccttaattcctccttcgccatggaccataacatattcacaggttccagggattaggacatggtcctcttggaagggtctgttattctgcctgccacaaggatgacagcagcaagtgagcctctttcctagcacctgggagcctgctcccacctgtggtcttgtccttttgaagctcacagtgtggtggtgaaggtggccatgaaggagcaactcactgaaacaatcaagcagtcacggttttgatgaattccataaaagaagagctcagggagctgtggaggagtcagggaaggcttcctggaggaagtgatgctaaagcaagatctgaaaaatgagtggaagctggccaggcaaagcagaggcagagggaacagcatgtgcaaaggccctgtggtaggaaggctagaaatggagtgcaaagagaaactgacatgatgaggctgaatgatgtggttgggtctggtcactgggggctttgcagttcatgttgagtaatttgagttttatttctaaggagaacaaagagcattataggcaaggggtggaggtgggagatcaaatgtgcattcagagatgaccatggtgtggagtagaagattgtggaggacaatggggtatatagaaatgttaaattcagaggaagatctggatcaggcatagccaaggtggtggggttaaatgggtaattgtcaaattatatttgggaagggggatcaacagggcttggaggcttattaaatgtggtggctaaacaggcaacctgaggtacagacacgtgaaatcacttgtcccaagactggattggctaggatagagtgttgattgtttccatagaaacaaaataactatgaatgaaacaatgcagatgtttatttttatctgtctcataaatctccaacttgaagatggaacagcgtcgtggaacaaccttgcctaggaggtcattccatctcccaggtgccttttgccttgttgcctctccaatcttaggcgtgagcctcatccccgtggttggaaatggatcaccccagtctgtccatcttccagcccatgtgaaaagggagaaaaagtgtggagtatgctctttcttttcaagggcatgaccagacagtacacacatcacttctattcattctccttggccagattttcaccaggtggccacagctagctgcaagagaagctgggaatgcagtcctaaactggatggttctattattataaggaagagggtggaatggatttgggggaacagccaccattcttggctttgaggtttgctgctggaacttgaactcagatctgccttgtcccgaaatttgcagttttcactctcacacttttctgtctagtgcttggatgttcatggtgtgatccatggagcaacagaattggcatcctccaggcacttgttagaaatgcaaaatccccggcccccttccccagacctgctgaattagtacctgattttccaagatgttcttggaatccaaggggaggcaggtgatactggtctgtggatactttgggtagcaaggatccagatgagtgcttctcaaacttccctgtgcgcacacatcacctgggatcttgttcaaatgcagattctgattcaatggattttgcatttccatctaactcccaggagatgcttatgtggctgactcacagaccctactctgagtagaaagggtctaggatctttgaggtacatggttaaatatgattggttgctgtatccgtttcctagggctgcttaaaatgacagaaatttattctcttcaagttctggagtccagaagtgtgaattcaaggtattggcagggccagtctttctccaaaggctatagggcagaatctgttccatgcctttttttaaggcttttgttattgctggcaatccttggtgttccttggcttctagacatatcactctgatcccggtttgcactgttgcatggcactgtccctgtgcatgtctgtgtgtctcttctcttcttataaggacacctgtggcccaccctactccagcactacttcatcttaacttttatcttaattgcatctacaaagacccagtttccaaataagatgaaattcacaggtaccagggtttaggactgtaacgtatcttttgggaggaacacaatccaacccataacagtcacctccacccttgtatgctgggttcccttgcagcctcactctaatgctctaatcttgtctaaacttttctttatacactgcctaggtaataactgtagagacagtaccttgtgcccagcttatgccacctgcaccaatacagtggacagttactattgcgcttgcaaacaaggcttcctgtccagcaatgggcaaaatcacttcaaggatccaggagtgcgatgcaaaggtgagttcatgtcccctcaaaccatccagcatttggtaggaaaatcaagtcaaagctggctgggtattgaatgtaggtactcccccaccccccatttttttttaaatctggtttaactatatattttaagtggagtattaggtcatttctgttcaaggttaatattgatatgtgggggtgttgttactgtcacagcattgctagctagtgttgctagcaaacatgattttcttccttccttccttccttccttgctacttccccacccttcctctctttgatcatgtaaataattcctggtcactgtaaaatttcatggatggttgagtttcctcacaatatggtggctggattccaaggataagcatcccaagagaacaaggtagaactacatgatatttttatgacctagtgtcacttccaccatagtcacaagtatgctcagattcaagatggggacataccttccattgcttgacagaagaagtaccaaagtgaagtgcatatgggatgggagatattgttttaactttttttttttttttttttgcaaaatacagtcttctatctagtataagtaaatttgtaactccaattctctgtctagatattgatgaatgttctcaaagcccccagccctgtggtcctaactcatcctgcaaaaacctgtcagggaggtacaagtgcagctgtttagatggtttctcttctcccactggaaatgactgggtcccaggaaagccgggcaatttctcctgtactggtaatgctctcaggttcccagggatgggtcttgggtggatatctatcagtggggtgagttcatgtatttctgaactgaggcacccaatttcttatctgctcaccctcttccactgcttctcagatatcaatgagtgcctcaccagcagcgtctgccctgagcattctgactgtgtcaactccatgggaagctacagttgcagctgtcaagttggattcatctctagaaactccacctgtgaaggtatccatgaccatctctttattatttacctacttaattaattaagggtcatctcactggaagaccatatgagaaagggattttctcatgtagggataagaaaattggggctcagagaggtaaaaatatatagttgcttatatctttttctatccctttactttgagcctgtgggtgtctttacatgctaggtaggtctcttgtagccagcacatggttgggtctttttaaaaaattttttatctggtttaacaatctatatcttttaagtggagcattaggccatttctattcaaggttaatattgatatttgagggttttgttcctgtcacagcattgctagctagtattgctagcaaacatgatttccttccttccttccttccttccttccttccttccttccttccttcctacttccccacccttcctctctctgatcatgtaaataattcctggtcactgtaaaatttcatggatggttgagtttcctcacaatatggtggctggattccaaggataagcatcccaagagaacaaggtggaagtacatgatatttttatgacctagtgtcacttccaccatagtcacaagtatgctcagattcaagatggggacgtaccttccattgcttgacagaagaagtaccaaagtgaagcgcatatgggatgggagatattgttttaacttttttttttggcaaaatacagtcttctatctagtataagtgaatttgtaactccaattctctgtctagatattgatgaatgttctcaaagcccccagccctgtggtcctaattcatcctgcaaaaacatgtcagggaggtacaagtgcagctgtttagatggtttctcttctcccactggaaatgactggatcccaggaaagccgggcaatttctcctgtactggtgatgccctcaggttcccagggatgggtcttgagtggatatctatcagtggggtgagttcatgtatttctgaactgaggcacccaatttcttatctgctcaccctctttcactgctttgcaaatatcagtgagtccctcaccagcagcgtctgccctgagcattctgactgtgtcaactccatgggaagctacaattgcagctgtcaagttggattcatctctagaaactctatctctttattatttacctgcttaattaattaagggtcatctcactggaagaccatatgagaaagggattttctcatgtagggatgagaaaattggggctcagagaggtaaaaatatatagttgcctatatatttttctatccctttactttgggcctgtgggtgtctttacatgttaggtaggtctcttgtaggcagcacatggtttggtcttttttacaaaaatttttatctggtttaacaatctatatcttttaagtgtagcattaggccatttctgttcaaggttaatattgatatttgagggttttgttcctgtcacagtgttgctcgctacttgctttgtgatctcagttgtgtaattgctttataggatctgtgaactatatgcaaatattaagtggaagagctgggatttgaactcctgctgaggacctactataagtcaaacaatggtatcagaatataatggggtgcacttgtctccagaccgatattttccccaggggacattggcaacatctggagatatttttgattgtctcaaccggtgatggtggggagaggtgctgtgtatggcatctgatgggaagaggtcagagatgctgctaaacatcctataatgcaccgaaaggcccccacaaccaagaataatctgaccctaaatgccaatagtgctgaggtggaaaaaccttattctgggctgggcgcggtggctcacgcctgtaataccagcactttgggaggccaaggcggatggatcacttgaggtcaggagttcaagactagcctggcgaacatggtgaaaccttgtcgctactaaaaatacaaaaaattagccgggcatggtggcaggcacctgtaatcccagctactcgggaggctgaggcaggagaattgcttgaacctgggaggcggaggttggagtgagctgagattgtgccattgcactccagcctgggcaacagagcaagactctgtttcaaaaaaaaaaaatacccaacaacaagaagaacaaaacacacaaaacctattctggggagattctaaagtctaaacttcagaacgttcccctaaaaggtatttgaattaacagttgaaagttatctttaatcagccgggcgcagtggctcctgcgtgtaatctcagcactttgggaggccaaggcaggcagatcatgaggtcaggagatggagaccatcctggctaacaaggtgaaaccccgtctctactaaaaatacaaaaaaaaatagctgggcctggtggcacgtgcctgtaatcccagctacttgagaggctgaggcaggagaatggtgtgaacccaggaggcagagcttgcagtgagccgagatcacaccactgcgctccagcctgggtgacagagcgagactccatctcaaaaaaaaaaaaaaagaaagttatctttaatcttttctctcccttcacattaaagcagtcatcacaccttggagaatctacctgctaaatatgttttgagactgggtgtggtggctcacacctgtaataccagcacttagggaggctgagatgggagaatcgcttaagaccaagagtttgagaccagcctgggcaacatagtgagaccctgtctctacaaaaaaaaaaaaaaaattagaaaattagccaagtgtggtggcatgtgcctgtggtcccagctactcaggaggctgaggtgggaggatcacttgaaaccaggaggttgaggctgcagtgcactatgcttgcatcactgcattccagcctggataacagagcaagaccttgtctcaaaaataaatatataaataaatatgtgttgaattcctccactgttttccatccttggttcaggcttgatcatcactgcagcagcctcctctctagtcttgcctttttcagtcttattctctccaatccatcctctacactgcagccagaatgtcctcaccaagagacaagagctccatcttcctgtgtctagtgcattgttattctccacattcatttatgggatggtgactccattgagaaaggcaaggagtggtcaagccctcattatatccccctggcttagtttaagagatgtttgaaatcatctctgcctttgctactccatttgtagcagtgagctatcactgggtaacaaattgtcttaaaaattagtgtctaaaaacaaccaccatatatttagcgcttgattccatgagttgacattttaagtggtctattctagccagatcttttggtctcaactggtcttgttcttgtgtctgcagtcagctgaccttggctgggcttttgtcttgttgcctctgccaccttaggtgtgagcctcatccccatggttgggaatggatcaccccactctgtccatcttccagcccaggtgaaaagggagaagaagtgtagagtatgctctttcttttcaagggcatgaccagatggtgcacacatcacttctatttattctccttagccagattttcaccatgtagctacacctagctgcaagagaagctgggaatgcagtcctcagctgtattgttacattattacaaggaggagggaatgggtctcacatgtctggggctcatctgggatgattcatttctctcccatttggtcttttgttcttcattaggctagtcaggggcttgttcatatggcagagatcagaggcccaatagaatgaacagaagccaacaggtctcttgaggcccaggtttggaattagcacctcattacttcactgtcttctattggtcagtgcaagtcgtagggccagctgtatttaaggggtagagaaacagactccacctcttaatgcaaggtatggtaaagtcacatctcttacaatctacatcttggggtgtaaatacagagagaagtaaaggactatggctacttttccaatttctgataattatgttttgaaactatttgccacccttctgcttacatgctattggctagaatttgctctcatggccatgcctactgaaagaaggaactgggaaatatgtcccactgtgtgcctgggaagaaggggggaacatggatattggggagcatcagccctgtctgctgaaaatcaacactcagagtgcatctcctatttgtagtctctactccttgctttctcatttaccttgacctgggttttctcttccactcttcagacgtggatgaatgtgcagatccaagagcttgcccagagcatgcaacttgtaataacactgttggaaactactcttgtttctgcaacccaggatttgaatccagcagtggccacttgagtttccagggtctcaaagcatcgtgtgaaggtaggtgggggtgtcttctgagaagtcaggtccaagtctgtttgaaaagacagcagtgaggggattagggtgggtcttggttgagtttgagactttcatctgcaaatctgaagccaataatcattcattcactcattaaagaaatacctcttgagcacttacagtatacgtggcactattctaggcactggggatagagcagtaaataacatctccaaataacatcccactggggcttagggcttccatataggaatttggaggaggggcaccattcagtccatagcacccatgaacaaacagcttgtaagtgacagagccaggctatgaacccagaatgtccatgttctcaacccctccactgtgtgcctctttttgtttgtttgtttgtttgttttttgtttttttggggtttttttgttttttggttttgttttgagatggagtcttgctctgttgcccaggctggagtgcagtggtacaatctcggctcactgcaacctccccctcctgggttcaagcaattctcctgcctcagcctcccaagtagatgggattacaggcatgtggcaccatgtccagctaatttttgtatttttagtagagacaaggtttcaccgtgttggccaggctggtctcaaactcctgaccccaggtaatctgcctgcctcggcttctcaaagcgtttggattacaggcatgagccactgcgcccagcctgttttttgtttttgagacggagtcttggtctgtcgcccaggctggagtgcagtggcttgatctcagcttactgccacctctgcctcccaggttcaagcaattcttttgcctcagcctcttgagtagctgggattacaggtgtgtgccaccatgcccagctaattttttattcgggacaggtaagccccaaagtggggtttagctcacaagggttcttggctttgcccaggagagaattcaagggcaagccagaggtagaagaaaacagctttattgaagaggcagtgttgcagttctgtaagtgttacagctcctgcagagcagggctacttcataggcagagagcagcagctcagggcagttttgcagtcatacttatacctacttttaataatatgcagattaacaggtggtttatgcaaaaatttctagggaaggggtagtaacttttgggtcattgagtcattgccatagaaaggggcagtaactccccaatattgccatggcaatggtaaactgacctggcacactggtgggcatgtcttatggaaagctgcttccactctgtccttgttttagctagtcctcaattttgtccagtgtctgagtccctcatctggagttgagtcctgtttcctgcctcattactagcttagcataatagaaatgtatcactctcataataattcaatatggatatacctggctggtgggcagcttttctccacatggtgataaaggagttcaatctctctccatcttttggtttttgcattccttagagccttggtgttcctggtttagccagttgaggtgaaagagggaggagagaagtcacacccacttcttgaccaccttggccctgaagtgacatatatcatggctctcatattccatgagtgaaaagtagtcacatgacctcacctagatgcagagggttctaggaaatgtagtccctggctgggacaccattttctagtgaaacatgactccatattttgcaaagggaagcatgattttgttggctcattggccaacttggctccacacccattctgtaccccacagatattgatgaatgcactgaaatgtgccccatcaattcaacatgcaccaacactcctgggagctacttttgcacctgccaccctggctttgcaccaagcaatggacagttgaatttcacagaccaaggagtggaatgtagaggtgagcagagagtttgatggacaatccagaaaagacatttctctttgctcttctgggtttcttgatattctccagttctttgcagatattgatgagtgccgccaagatccatcaacctgtggtcctaattctatctgcaccaatgccctgggctcctacagctgtggctgcattgcaggctttcatcccaatccagaaggctcccagaaagatggcaacttcagctgccaaagtaataatctctttgtatgtcttggcaatggaatctgtttctggctttggttggaaaattctcattctacccaacctcgggatcttcctcttagtgttgcctcatccacatattctgtttctttttcttcttcatccatttactctttcaacaaatgatttttggagtacctattaattaattagttaaacaggaccctgcagtaggcactgaagatttggtcctgaatatcataggcatgcttcttgtcctcttgtagcttatagtctagggaaggagccagaacacacacacacccaattatttaattataactatgaatgaaacaacaacaaaaaagtgtgcttttttttttttttttcacccaggctggagtacagtggcaggatcttggctcactgcaagctccacctcccgggttcacgccattcttctgcctcagcctcctgagtagctgggactacaggcgcccgccaccacgcctggctaatatttttgtatttttagtagagacggtgtttcaccatgttagccaggatggtctcgatctactgacctcgtgatcagcccgcctcggcctcccaaagtgctgggattacaggcatgagccactgcgcctggccaaaacatagtgtgctttgaagtggctaataggatattgattatgctccaagcaaacaacatttaagcagaaacctgaaggaggagaaggacttctctagaggaagaatggagatcatgctgttctgggttatagcagatgcaaaggtcctgaggctcacaccaaatgaggacaaggggaagtggcagtagacatatctgatgaagtggacagaggtcagattctgcagggtcttggtggcttgtgaagaattttgaaagggctggatgcagtgacatacctataaacagcactttgggaggccaaggtgagaggatcacctgaggccaggaattcaagaccagcctgggcaacattgcaagactccgtctccacaaaaaataatgataaaaaattagccaggtgtagtagcatgggcttgtagtcctagctactcaggaggctgaggtgggaggatcgcttgagcctgggaggttgaggctgcagtgagctgtgctcatgccactgcactcaagcctgggtgacagagtgagaccctgtcttttgtttttttttctttttttttttttatggagtctcactctgtcgcccagactggagtgcaggggcgcgatctcagctcactgcaacctccacctcccaggttcaaatgattcttctgcctcagcctgccgagtagctaggattacaggtgcccatcaccacacccagctaatttttgtatttttagtagagatggggtttcaccatgttggccaagctgttcttgaactcgtgatcttgtgatcctcccacctcagcctctcaaagtgctgggattacaggtgtgagccaccgtgcccggccaacctttcttttaaaaaagaatttcagagtcctttcccctccccccaagaataatggggaaccatgaaaggtttaaaactgttaaattatgtattatttattacattaaaaatatgtgtaacttattggaggcaatgaagtataacaagcaaatgaatatatctgatgtatttccaaatataataaagataatatcatcaatgtcgctggttctcctatatgtttcttctccattctatctccttgtatcctccttagacagccacttggaattttgtgtttattatttccctacttaaaaaaatattttcccatggtatgtacccctaaacaatatctgcctagtattgcttgtgtttggagctttgtaaaaatgatatcatactacatatgactatagatgtatgtcttttatatgtatgacttctctaatttgctctgtttcactcaatatcatgcctcttagagtgtaagctgtgcagggacataatattgagtgagaagtcacacatataaaagacatacatccacaatcatatgcatgattgcctctaagaggcatgatattgagtgaaaccgagcaaattagaaaattgtgtgttgtagtaaacacgtccttcatgttgtagtgtgtagttgtggtttgttcattttcccccttgtgtattagggtaatagatggattttaagtcgggcacgggaggacatgaaatcagacttgaattttcatcttattttgctgaggttgaagtttggtttggttgctgttgttttcttcctaggggttctcttcaaatgtaaggaagatgtgatacccgataataagcagatccagcaatgccaagagggaaccgcagtgaaacctgcatatgcaagtattttttaaggttcctagtttttgaggttttcttagaagccatttaggtagaatgttgtttttgcagttctaacaaaggcaaaagtaatagtggccaaaaccagacagcagtttatttttctcctctgtaacctgctgagtgtaagctgtgcagagctcataccatggctccattatgctctgccagcatcaacacaagactcccactttgtggcccaaggtggcagctccagctcctgccctcacatctgcattccagcttgtgggaaggggagaagaggaagtgaaaagtacggtccttctctttaagcgtatgacccagcaccacttctgcttgcacctgattgggtagaaattagtcacatggtcccacctagctgcaagggaagctgggaagagagaatgtttgcctatctaaaacttgaggattctcttaataaaagaacgggagaatatattggagtcttcctgccagtgaaggtgttgatgctgcaactgagtaatgttggtgtgggggtgttacacagccagccaggccaaaaggaatttggacatcctgactgtctaatgaagtcattacaatgagtaaagactccatgacctctttagaaatcaatgtcactattctaaatatgagcttgtaaattggctatgggcttcccacatgccttggaccactgtttttcttttttaattgtggtgaggtacacataacataaaattcaccactttaactattttaaagtgtgcaattcagtggcacttagaccattcacaatgttatgcaatcatcacctcaatctagttctagaaatttttttttttttttgagatggagtcttgctctgttgcccaggctggagtgcagtggggtgatcttggctcactgcaacctccgcctcctgggttcaagcaattcttcctgcctcagcctcccaaatagctgggactacaggcacccaccaccatgcctggctaatttttgtgtttttagtagagacggggttttgccatgttggccagactggtctcaaactcctgaccttgagtgatccacctgcctcagcctcccaatgttctgggattacaggtgtgagcaccgtgctcagccaagttctggaatatttttatcactaagcagtcactccccattctcccctcccactagcccatggcaaacactaatcagctttctgtctctgtggatttgtctattcttgacatttcacagaaatggaatcatgcaatgtttgctcctttgtgtctggcttctttcacttagcatgatattttcaaggttctttcatgctgtagtacatatcagagaactccattcctttttatggctgaataatattccacatggaccactgttagttcatacatttcctcttcttttaatatcactggttgggaacaggccccccaaaatctggccataaactggccccaaaactggccataaacaaaatctctgcagcactgtgacatgttcatgatggccataatgcccacactggaaggttgtgggtttaccggaatgagggcaaggaacacctgcccagcccagggcggaaaaatcgcttaaaggcgttcttaaaccacaaacaatagcatgagccatctgtgccttaaggacatgctcctgctgcagataactagccagacccatccctttatttcggcccatcccttcgtttcccataagggatacttttagttaatctaatatctatagaaacaatgcttatcactggcttgctgttaataaatacgtgggtaaacctcgttcaaggctctcagctctgaaggctgtgagacccctgatttcccacttcacacctctatattcctgtgtgtgtgtctataatttctctagtgccgctggcttagggtgtccccgattgagctggtttcagcaatcactaagtagttttgctatttgtttatgtttgctttttttattcatggaaggaaaaggtgatgtgattctaattctgatcaagtaatgagttttagtttccctgagaattctagagactcaggaattcagagccacctcatatgatgggctttatgggctaatttgtagattacatgcttgggggaatacatcgattcatgctcacaaatgctctttttttttttttctgggacgcaggtctccttttgtgcacaaataaataacatcttcagcgttctggacaaagtgtgtgaaaataaaacgaccgtagtttctctgaaggtaacgattgggtcttttaaattgtgttttgagtttcaaacatcttgggcacactttgggtgcagaaagatgtctttatggctgggcgtggtggctcacacccataatcccagcactttgggagattgagtcagatgaatcacttgaggtcaggagttcaagaccagcctagccaacatgatgaaaccctgtctctactacaaatacagaacttagccgggcatggtggcaggtgcccatagtaccagctactcaggaggctgaagcaggacgattgcttgaacccgggaggtggaggttgtggtgagccaagatagcaccactgcacttcagccttggcaacagactgagactccatctcaaaaaaaaaaaaaagaaagaaagaaatatctctttataatgaatggattgtgaattaatatttaattttttatagctgtaagatttgaaaaattagcatacagtaaaattacctttttacttgtatagtttgatgagttttctcacctgaatagacttgttgaactaccactataattaggatgcagaacagtttaattatctccaaacattcccttgggcttctcctttatagtcagatactccctccaccactaaactctataaatccctgatctggtctctgtcaccagagttttgtctttggaagagtgttatataaatgaaaccacatagtatgtggtcttttgagactggcttctttgactcagcatagtgcatttgagatgcctggatagtgtgtatataaacaatgccatttcctcctcctcctccttcttccttctttcttttccttcctttttactgttaatgagattcagcacattctcattgctgtatataaccatcaccattatccatctcaagaactttctcatctttctcatcttttcagggggacagaattggttggtggttttttttgtttgtttgttttgttttgtttgtttgtttgttttgagatgaagtcttgctctgttgcccaggctagagtgcaatggtgcgatcttggctcaccgcaacctccacctcccaggttcaagcgattctcctgcctcagcctcccgagtagttgggattacaggcatgcgccaccatgcccggctaattttgtatttttagtagagacgaggtttctccatgttgatcaggctggtctcaaactcccgacctcaggcgatccacctgcctcggcctcccaaagtgctgggattagaggtgtgagccaccaagtctagccaaaagctagtttttcttaagctttaagttgaactcattgatattgtcattttctttataaatctggttatttttgtatgaaaataagaataacacttttacttataattgtattaattttaaattaatacatttatttttattcataaagtatacattcatccctagggttttcagattaaattttgataaatgattaatcctatttacaaacttagttcaatttcctcgaatgttttatactatgtttataaatattccaattcccccctcccgctccacccaaatttcaagtacctggtgaagaggatttacaaatctaataggcaaagtcacttgggtcctgagcgactcataaatccaatcgatcgaatctataaatataataattcagattcttttagacattcaatatggtttataaatagccacgttctcttaaattgttcatattaaaataacaagtctaattgctttttgcaataaaattatgtggtttattggttagcttctctaatgtgtcaaactgttccaactctttttttttttttttttttgagatggagtcttgctctgttgcccaggctgcagtgcaatggcgcaatattgactcactgcaagctccgcctcccgggttcatgccattctcctgcctcagcctcccaagtagctgggactacaggcgcccaccaccaagcgtgggtaatattttgtatttttaatagagacggggtttcaccatgttggccaggctggtctcgaactcctgacctcaggtgatccacccacctcagcctcccaaagtgctgggattacaggcataagccaccacacccagccccaactctttaaataggagatgtttctagattatgctaaagatgtcaaaaacttctaaatttaacacaaatcctactaaggatgtttagtttgcctaaaattttctaactttcctgaggatataaaataacttccctagctaagaataaatttaacatatcagaggggcgggatttgaagagattttgccagttgtcgaactgagtactatgtttcctggagatggtcctagttgagatgtttctgctatgtcagtggggaggggagtcccacacccatgccttttggggattacagagctcagggcttcctgtttctcttggacaaatatctctcaaatgtcccgcttaccccgtgtttattgaaatcctttttttccttttatcatctaatttggatagatagaaacttgtattgctgctcaaatttcagtttaatttcctctaccatctgactggatttaattcatttaatgcattttcctgcatttattaggttctggattccttttagttttttttttttttttttttgcttgggtcagagtcacatgtgatagtcaatttattgataataatcaataataaggggaatcatatgaatattactattactattgttgttattgtttttcttaccttaatcctattcctcaaacacatccagtgttaagaggtagataagtatcttcccctatctttttaccttgtaagcatgtacacacatacacacatatacatacatacacatacaaataaacacacacacatatacacacatgcgcacacacatacacatacatacaaatacatacacgtatacacacgtgtacacacacatatacacctcccccacatgcacacacatgcacacacagtatgtacacacatacacacatatacatatgcatatacacatataacatacatacacatgcacacatacacatacaaatgcatacacacacaccccacacacatttacacacatacacacaccccacacacatttacacacatacaccccacacacatttacacacatacacacatgtatacacacatctatgcatgtacccatacacacatacagacatacacagacatctacacacagatacacacatacacatccacacacatatacacactcctgacacacatacacacatatatacatacaggcatatacaaatgtacacacatacacaaacacacatatatacacacacgtatacatacatatacacaaacacacatacatacataggcatacatagacatacacagagatatacacacatgcacacgcatgtacacaacccaacacatacacacatatacacacacccacatatataagcacacacacacacatgcacacacagtgcagtcattttattgagcacttactatgagaggtttaggacagtgattaatgattcagcctctgctgccagactgccaaggttcaaatcgtggttcttccacctgctagatatgagtccttgtttctcctttcaaaaatcaaaataatcataaatagcctctacttcatagatatcttctacaaattaaacaagttaatatataaaagacatttagagcaatacctggctcgtaataagtgtgtgctatttttatttctatatgccagaacataaataccataatataaaattttaaattaaaccaattgtttctaaaccaaatgcaatactatatacatgatactctgtaatttgctttagtgaacagtggctcagagacccttttgcttgttaatgcctataggtatactgcaatattcattttaacagctgtatggctgttatttgatttcatcttcatttattgacccagtctgtagggcatttaggctttccacaaactatcctgagatgaacatcactggacaagatccttgcacaacttttaagtatttctgaaaagattaattccaggaaggggaattgctgtgtcaaagggtatatgcaatttacatggctatgggtacaaacttactgcattgcataaaggttacatcaatttgtctttcttgcttgctttcttgctttcttttgacaagatctcactctgtcacccaagctggagtgcagtggagtgatcatagctcactgcagccttgaactccagggctcaagagatcctcccacttcagcctcctgagtcgctgggactagcgtcatgcaccaccgtgcctgctcttttttaatttgtttgtacagatggggtcttgttatgttgtccaggctggtcttgaattcctgaacttcaatttgtatttctttttttttcttttttcagacagcctctctcactgtcgcccaggctggagtgcagtggtgcgatctcagctcactgcaagctctgcctcctgggttcaagtgattctcctgcctcagcctcccaagtagctaggattactggcacgtgccaccatgcccggctaaatttttttgtatttttagtagagacagggtttcactatgtttgccaggctggtctcaaactgctgacctcatgatccacccacctcagcctcccaaagtgctgggcttacaagtgtgagccactgcacccggcctgaatttgtatttctgatggggcttcttgaatcagaaaaaggagcccgagtggatgccccttttaattctcctttggatggactcccagcctattcttaatcagaaaagggacagctgttatttcattaatgagagagagagagagaatgaacaaacacatctttccttgcagaatacaactgagagctttgtccctgtgcttaaacaaatatccacgtggactaaattcaccaaggaagagacgtcctccctggccacagtcttcctggagagtgtggaaagcatgacactggcatctttttggaaaccctcagcaaatatcactccggctgttcggacggaatacttaggtaggagacaccctttgtggcaaggttacacctaggggatgattttgaaagttgactttggcaatgggatattccctgggtttcccacccattctttccccaactgtttaaaaactttgaattcacagcaaagcaagtctaatcatattaacaacattttccattcactgagtgcttggcaaaggccaggcactgtgctaagaccatatcattaatttattctacaaatatttgctgattagctgctatgtgctgggctaaggtatgacagtcataggctgtgctcaagtacttcctgtttgccctgctgggcccatggtagaattgtacttcctggctactgtgtggttaggtgggatttggggagtagctcaggccaataaatatgggaatagagtagttgcaggtatgagactttccagaactttccctctgcccatatgaataacagtgcttcagatcacagctgctccttctgcctgggtcccagaataaagacaatatagaacatggcctcaagtcaatttacaatagacccaaagcattaatgagatgtaaacacttgttattttttaatccactaagacttagggttgtttgttactgctgcaagactgatcctttcctgactgatacatacttgatagataactacttgggaatagtggttgctgtagatcttttacattagcaccccactcctggtagtagttccagtatcattcacataaacctacgaagttcctacctaatggatgcccagacggccaagaggtggaaataaagtatttggtggactccaaccagtagtgaacaaaattagcctcatgaatctcatattttagtgagttgagtcagataataaacaaacagacatctggtataccaaatagaggtagcactattgagaaaaagtacagcaggctagggaggttagagagggttgggattacagggagagttgctattttatatagcaagatcagagtaagtctcattggggcagggatgtcagggaagagagccacgtaaatatctgcagaaagagcaagtgcaggaatacctggagaattcaaggaacaatgaggtgcacagtgtggctgaagtggcattgaagatggtgagagcagtaggagaaaggaagggagatggaaatgtagataaatgtagggagttaaggttttttttttcttgagacaggttctcactctgtcacctaggctggagtgcagtggtgtgatcatagctcactacagctttgcactcccaggctcaagtgatcctcctgcctcagcctcctgagtagctgggaactataggtgtgcaccaccatgcttgtctagtttttaaaatttttggtagaaatgaggtcttgctatgttgcccacgctggtcttgaacttctgagctcaagtgatcctcctgctcggcctcccaaagtactaggattacaggcctgaaccactgtactcagccaagattttatttgaagatgaaaggacattggaaaatttgggaacaggtatggtattatctggcttatattttacaaggatacttcttgttccattatctagtttattttcatgaagggccagtgggttaggtcctgcaatgcttgtcatgatagagatgagaaattggaggcacagagaggttaagtcaatgcgcaaatttaggcagctagtgcgtggcagagctggacctcccagttaccaccatctgactacagaacctgagctcttgtgtaccatgctaggcttgccccaatcccttactatttcttttggttttagaaaacttatataaggccgggggcagtggctcacacctgtaatcctagcactttgggaggccgaggcaggtggatcacaaggtcaggagatcgagaccatcctggctaacacagtgaaaccccatctctactaaaaatacaaaaaattagctgggtgtggtggtaggcacctgcaatcccagctacttggaaggctgaggcaggagaatggcgtgaacccgggaggcagagcttgcagtgagccgagatcgtgccactgcacaccagcctaagtgacagagtgagactccgtctcaaaaaaaaaaaaaaaaaaaaaaaaaacttagagagaaaatcatgactgttgccttccatcactgttgactttgaccccatctttccctgatgcaccccctaggagatgagagttcacttctaaggctccagctgggttactcatttatttggtgctatggtccccctatcattcatcatgggcctcaagatctttcctatgatgaattgaactttctattcttttcctttgctcgccatgatggaggtgtacctttttttggacagaaaccaaattcaggactgactttctgggtgacctcatacgaactctccctttctctttttagacattgagagcaaagttatcaacaaagaatgcagtgaagagaatgtgacgttggacttggtagccaagggggataagatgaagatcgggtgttccacaattgaggaatctgaatccacaggtacaggtcctctcctgagaatgcaggttatggtgtattccatcaataagtatttatcgatccctttctaggtgccaagaccagtgccagatagttgagaaccaatgagggtagaaatggtccatgctctcagagagttttccatgtgctagggaagtcaaacattaaataaccttataatactggagtactgagaccttcactggcctatatgatatgtgctggtcacattctgctgttgagcagttgaaatttgtataagccaggttgagaggtactgtaaacctaaaataaacactgtatttcgaagctttgttgcacaaaaagaaggattaaaacgtctcactcatcttttttatatttaaaataatttaaaaataaaaaatatttaaatttttaaaatatgtaatatttaaatttttaaaatatgcaatatttaaaatatatctttaaattttaaaatatcacatttatatgttgaaatgataatatttggcttatactgagttaatatattattaaaattaattttatctttttttacttttaaaaaatgtgtactagaaaatttaaaattacatatgtggttcatactgtatttctgttggacagtgctaatctgtgtcagggatggcaaactttttctgtagagggctcgttagtaactattttaagcattgcaattaatacagcctctatcacaatgatttaactaccattctagtgcaaaagcatccatagacaatatgaatatgaatgtgcctgggcatgtttcaataaaactttatttaaaaaagtaggtgacaaccagattggcccataggccacagttttccagcccctgatctgatctatgcatacgattaatgctatgattaatactttaatgtaaaagcacagtgtgcaatatggaagagctatttaagcgaagtcctgaggaataggtagagaaagcaggagagagtgtgttacaggaagtataagctatggctctgtgttgaaaaaaagcttggtatggtcatggaactaaaagtagagtgggctggagcatcaggaatgtgggggagagagggaaaagaattgagggtcgctgggcgtggtggctcacacctgtaatcccaacactttgggaggtggaggtgggtggatcacctgaggttgggagttcgagaccagcctgaccaatatggtgaaatctcatctctactaaaaatataaagaatgagcctggtgtggtggcgggtgcctgtaatcccagctactcaggaggctgaggtaggagaattgcttgaacctgggaggtggaggctgcagtgagctgagatcgcgccactgcactccagcctgggtgacagaatgagactccatctcaaaaaaaaaaaaaaaaagaattgagggtgttgcatcccagtttattacatttggactttctctgttgggcacagaaagccttggaaagttctgtatacagcaggatgatctgattatgtcttccagatagatgtctttttagaaataaatcctctggctgtgatatgggcaatccattggagaggtgaggctaggggaaggcaaggacatttgtgaggaagccagtggtctgggagagagatgtgaggcttggtctaaggctaattagaagggagaagtggggagaagacaggttcaaggcacattaaggaggaggaatctgttttgcggggagaagaattcaaggatgactctccaggttccagatcaggtaatatcagttattgaagtaggagatgcagataaaagaagatgagagagccaggcatggtggctcacgcctgtaatcccagcactttgggaggccaaggcgggcagatcacctgaggtccagagttcaagaccagcctggccaacatggtgaaaccccgtctccactaaaaatacaaaaaattagctgggtgtggtctcgggtgcctgtaatcccagctactcgggaggctgaggcaggagaatcgcttgaacccggaaggcagacgttgcagtgagccgagaacctgccattgcactccagcatgggcaacagagcaagactctgtctcaaaaaaaaaagaagatgggagaggaattgctcaatttatgatgtctggggggacatccaaggggcagatgaagcctgggggttggtactgtctggttgggacaggaagcggcataggacgtatccctggagaccgtccatatttaaaggggacactccccaaagagactgaaacagaataaccatagatgtgggagaacttatttcccactgagttgcattgtcccttaaaaacacaagttcaaatttatttttaaatgtagccaagacttctccaggtaagagcactgggaggtctgttttgttttgttttctttttttgtcacccaggctggagtgcagtggcgggatcttggctcattgcaacctccgcctcccaggttcaagcgattgtcgtacctcggcctcccgagtagctgggactacaggcacctgccaccacgcctggctagtttttttattgttagtatagacaggatttcaccatattggccaggttggcctggaactcctgacctcaagtgatccacttgccttggcctcccaaagtgctgggattacaggcgtgagccactctgcccagctgtggaagtttttattttgttttgttttgaaatggagtcttgctctgtcactaggctggagtgcagtggtgcgatctcggctcactgcaatctccgcctcccgggttcaagcgattcccctgcctcagactcccaagtagctggagctacaggtgcgcatcaccacgcccggctaattttttgtattttagtagaaacggggtttcaccatgttggtcaggatggtctcgatctcctgacctcgtgatccacccgccttggtctcccaaagtgctggattataggcgtgagccaccatgcccggccagaggttttttttttttaatggttctagaagcccgctggttattttaatctcagagcagcacggtgaggtgcatgactctctctctctctctctctctccccctccctccctctgtgtgtgtgtgtgtgtgtgtgtgtgtgtgtgtgtgtgttgggtcttctataataacaattgagcaaacgattccttcctttttttcatttggggaaacctgcagagaccactggtgtggcttttgtctcctttgtgggcatggaatcggttttaaatgagcgcttcttcaaagaccaccaggctcccttgaccacctctgagatcaagctgaagatgaattctcgagtcgttgggggcataatgactggagagaagaaagacggcttctcagatccaatcatctacactctggagaacattcaggtttgtgaagaggtctctactgagattcttgtctacctgttgggaactcctcgtctctcgattgccttaactctcattttttacgggaagctattgaggccggtaagcttccacaatttccagcaattcaagccaattaacagaagctaccgctagaggaatgaggtctcccactgtcaccaaacagaactaggtccatttgcccatgtgcaacagaaagccaaacaccgaagcaccgggtttttgtagagagagaagtttattgcaaggctgccaagcaaggagacaagagtctggctcaaatctgtcttcccaagctgggaggctggggcaggttttatagtcggtgggtaatgaactgcaatctgattgcatcttacaatgaagtgatgcagggaggtgtgatctgattggatccggccatggggtgttgccaggtcttgatctgattggatcctggatcctgctatgtggtggttgcttctttttttttttttagtctcactctgtcacccaggctggagtgcagtggcacaatttcaagtcattgcaagctccacctcccaggttcacgccagtctcctgcctcagcctcccgagtagctgggattacaggcgcccgccaccatgaccggctaattttttgtatttttagtgcagacggggtttcaccatgttagccaggatggtcttgatctcctgacctcgtgatccgcccgctttggcctcccaaagtgctgggattacaggcatgaaccaccatgcccgcttttttttttttttttttttttttgagatggagtttcactcttgttgcccaggctggagttcaatggtgcaaccttggctcactgcaaccctcacctcctcgggtaaagccattctcccgagtagctgggattacgggtgcccaccacatgcccagctaacttttttgtatttagtagagacggagtttcaccgtgttgctcaggttggtctggaactcctgagcttaggtgatccacccgcctcagcctcctgaagtgctgggattacaggcatgagccaccgtgcccacccttctaggatacattcttaaagcatgttgttcttaaactgttactaaaaatatttctctgcttacttggtttttatgattttttctcccactgcactatgatctctttttgggggaagaactgttttctcatgtctcctgtaaacagcacagatcaaggcatgtaataggtgttcaataaaaacacgttgaatgaggctgggtgtggtggctcttgcctgtaatcccagcactttgggaggtctatgcaggaggatcacttgaggtcaggagttcgagaccagcctggccaatatggagaaaccccatctttactaaaaatacaaaaattagctggatatggtgacacacacctgtaatcccagaactttgggaggcccgaggcaggtgaatcacttgacatcaggagttcaatactggtctggccaacatggtaaaaccccgtctctactaaaagtacaaaaattagctaggcatggtggcgggcacctgtaatcccagctacttgggaggctgaggcagaagaatcgcttgaaccccggaggcagaggttgcagcgagccgagactgcaccactgcactccagcctgggcaacagagtgagactctgtcacacacacacacacaaaccacacattcaatgaataagtgaataatgagtgactatgcagaaggctttattatggatttgatgaaaggaggagttttcttctagcaacagcaatgtgagctgccctatcagattggccctcactgcataatgaaataccagcatttttccccattccctcagaacataccctgtgtattcttgttcccagtgactcttgaggatggtcacatttaatccatttgatggggattcccagaagacctttgtttttttgtttttttgttttttttagccaaagcagaagtttgagaggcccatctgtgtttcctggagcactgatgtgaagggtggaagatggacatcctttggctgtgtgatcctggaagcttctgagacatataccatctgcagctgtaatcagatggcaaatcttgccgttatcatggcgtctggggagctcacggtcagtactgatgatttgttccctgaggcagagtatctgcctccaaatccaatgggaaaatattgattaaacatctgttgtgtgtctcccatggggttgggtgttgtgggatggagtcacggggacagaaggggtaggtgatatgcctttgcccctgcagaatttacagtctggttgggaggccatgaaactcaaatatacaatgagaaataatgaccctaagtagggccaggcactggagcaatcacagatcttacttaatgagcacatacagtgtgctgggctctttaagttaagtggttttagacccatttcacagaatgggtaaagtggcccgtctagtcctgaagctagaaattggagcaggtggaattcaaatctggggaagtctctttccactaacacatgcaaatgggtcaagaagaaatgctgtaagaattcagaggtgttggccgggtgtggtggctcatgcctgtcatccgagcactttgggaggctgaggcgggcggatcatgaggtcaagagatcgagaccatcctggccaacatggtgaaacccccgtctctactaagaatataaaaattagctgggcatggtggtgcatgcctgttgtcccagctacttgggaggctgaggcaggagaatcgcttgaacctgggaggcagaggttgcactgagctgagatggcaccactgcattccagcctggcaacagagtgagactctgtctcacacacacacacacacacacacacacacacacacacacacacacaaacaaaaagaattctgaggtgtttccaagagagccgatgatagatcatgaggaaacaatatgaaataagccttggtaaatgagtagatttggaagagaggaaggacatcctcattagtgttgtagaaagtatcctttcacctggctcggtggctcacgcctgtaatgccagcacttcgggaggccgaggtgggcagatcacaaggtcaggagatcgagaccatcctggctaacacggtgaaaccccatctctactaaaaatacaaaaaattagccgggcgtggtggcgggcacctgcagtccaagctactcgggaggctgaggcgggagaatggcgtgaacccgggaggcagggcttgcagtgagctgagatcatgccactgtactccagcctgggtgacagaaccagactccgtctcaaaaagaaagaaagtatcctttcctatcatggtagatccaaggtttaattccctaccagagaggccataagtaagtgccatttcgaggaccctgtggcttaggatttaagagaactggatccagaacaaaactgacttagtttcaagtcttgtctctaccactttctagctgtgttttcttggaaaagtcacttaacttctctgcactgagcccagctctctcatctcaaaaatgagaacaacaataacaaaaaaatactgataactagtatttatatagtatgcttctggcacagttgtacttgaaatgttttcatttaatcctaaaacaactctataaggcaattgccattaatattctcttttcaacagatgaggaaactgagggcacagagcagttaagtgtcttgtccaaaatcacacaactagaaattggccagtttttttctttctttttctttttcttttttctagactgagtttcactcttgttgcccaggctggagtgcagaggtgtgatctcagctcactgcaacctctgcctcccaggttcaaccaattctcctgcctcagcctcccatgtagctgggattacaggtgcccgccaccatgcctggctaatattttttgtttgtttgtttagtagagataggatttcgccatgttggccaggctggtttcaagcttctgagctcaggtgatccacccgccccagcctcccataagtgctgggattacaggcatgagccactgcgcccagccaatggtcagttttcttaaccactttgtgacaatatcatagagaggtgctcataagatggtgcctggcttatctttaacccacagaaaccactcagagacatttaaaattaattttaaaattaattatgaataaatggcatagaagaaggacttagcttgtcacgttccactcctgaagttgaagcattcctgaatgtctgcattatcagttgggattcagtacaggaagcaaaaaccaccccaggtatttcaagcagaaaggcatttaacacagggaattgggtgctcacaaaaatctctgggaggggatggaggagttgaagtcagggggctgtcacttcaattttggcttcaaggtcatcccccaatgcagctgtaactcagaggtcagaaattgctgctgtcattttgccaccccactccaccatgaaattggggactggacagttgaaatgtggaattaggctcactcctgtctgccgaaagctgatatttgcctcccttctgcattccaaaaccttcacagatgtatctcactggagaacttaaattacatccaggaccttagttccaaaggattctgggagatgtagtttgtggacatcaagccccagtaatacatggagtaacgcataggacaggactgggaataggtgctggtggatgccagtggattgcaaaggataatgaaggacagtatctagttcactctgagtgttagagggagaaaattcccccaagctaattttgcccgagccagggttttagataactcttcttcccgcctggggggattttgatcccattctcaggccaactctgaaattccttcctgacagatggacttttccttgtacatcattagccatgtaggcattatcatctccttggtgtgcctcgtcttggccatcgccacctttctgctgtgtcgctccatccgaaatcacaacacctacctccacctgcacctctgcgtgtgtctcctcttggcgaagactctcttcctcgccggtatacacaagactgacaacaaggtctacatcgctcgggctgtgtccccaccaagccccatcttctccccacctgcctcagctcattcctagccaactccctctatccctgttcctacctcagggcctttgcatatgctgtgccctctgcctgtaacactcacttcccagcttcttacctgcttgactccttgtgacagctctcagtttaaacttatgtccctgatcgtgttatgaattatagtggttcctcctattacttgtttttgtttgtttgtttgtttgtttttgatactgagtttcgctcttgttgcccaggctggagtgcaatggcacgatcttggctcactgcaacccctgcctcttggttcaagcaattctcctgcctcagcctcctgagaagctgggaatacaggcatgagacactatgcccggctaatttttttgtatttttagtagagacggggtttcaccattttggccaggctagtcctgaactcctgacctcaggtgatccacccgccttggtctcccaaagtgctgggattataggcttcagccatcacgcacggcccctcctgttactttctaaaccagaggttctctccctgggtgctttttgtccccaggggagacttggcaatgtctggggacatttttccttgtcacaactggagcagcgtgctactgctctctggtgggtaaaggttagggatactgctaagtatcttgtcgtgcccaaggcagccctccacggcagagaatgactctgcaataatgttacagatgtcgataatgctacagtttagaatctctacttccctttatttttcttttctttttttaaatttttaatttttttagtttttttgagacagggtcttgctatgtcacccaggctagagtgcagtggccgaatcacagctccttatagcctaccaggctcaagcgatcctcccacgtttgcctcccaagtacctgggaccacaggcctgtgccaccatgtctggctaatttttgtatttttgtatagagaggggggtttcatcatgttgcccagtctggtctcaaactcctgggcttgagcgatctgcctgcctcagccttccaaagtgctgggattacaagcatgagccaccacacccagccagtaaaactttatttacaaggcaggcagccagcctatggggtctagtttgctgaacccgcctgttttcaaccattccctaaagtagggtgatcgacaatcagttttcctaaaactcttcctgttttagaactgaaagtcatgcgtcttgggaaatcttaggtccagacaaaccaggaccatgggtctccttaccaagaagtgctcctccctgtggtcaagaaccactgcacctctctataaatgtttgtgagatgaatgagtgagctaggtttggggaatttccagccgaggagtctctctcttcctttcttcctttcgatttctctctggggtggaggattctgatgcgcatgcttctcccctccagatgggctgcgccatcatcgcgggcttcctgcactaccttttccttgcctgcttcttctggatgctggtggaggctgtgatactgttcttgatggtcagaaacctgaaggtggtgaattacttcagctctcgcaacatcaagatgctgcacatctgtgcctttggttatgggctgccgatgctggtggtggtgatctctgccagtgtgcagccacagggctatggaatgcataatcggtgagtgacatcctctctcttcctgaagaccctgctgccagggcttatggtgataatgacatgagcaacaagaagagtaacaacagtagcagtagttgtggctaccatttatcgagctcttctattatgtactattggtttcaggaccaccatgtacagcagcatgggttgtgcactgcacaaatccaggatcactactatttgaggtttatgttccaggaagagaacatctggtttacctaacttgattattttccttttcttgcgtgtatgacatggggggtggtgggggtgaaagtgggaaaggaatacttctgcatggtggtgtgcacctgtaatcccagctactcgggaggccgaagcagaagaatcacctgaacccgggaggcggaggctgcagtgagatgagatggcatcattgcactccagcctgggggacaagagcgagacttcatctcagaaaaaagtggggggaatattggggtgctgttattgaacatgacggaatggttgttgtgttgtaaaagcagctaatgtacactagagacataataaaaggagccaatcctttcttcctccctcccactctccctccctccctcctcccttcttcctccctcccctcttccctccctccttccttcctccctccctccctcccttccttccttgccttccttcccttccctccctccctctcttcctcccttcctccctcccttctttccttctttccttcctttcttcgaataaacaattttatgaaatatcttgtctatgctaggctgtgctctgagtgctgagtattcagagatgaacaaacacctaaggcccaaattctcatgaaactcatagtctagtagtggaagacagtttgcagttacacaagcaattaaacaaggtaacttacgatagtgatagctgctgttttaaaaatgcagtgagctctgctagatggataccaggagcagagacaggttgccctatctaaggatagtcaggagtggcttctcagaggaggtgacatttgagctgagatttatttatttatttatttatttgttatttatttatcttgagacagagttttgctcttgtcacccaggctggagtgcggtggcgtgatctcagctcactgcaacctccacctcctgggttcaagcgattctcctatctcagcctcccaagtagctgggattacaggcgtgagaccccacgcccggcctgagctgagatttgaatgataaggtgtaccagtggagagttctgcatagagggaaacaggattacaaagttgtgaattgggaaatgagctcaaccttgggcactaggtaaacatttcaggtacatttgcccaggaagaaggtctaaaagaggaagcgcagtgatctaaaggaaactgaactgcaaccgggaccatcctgagcatcatctgagtctcacctcccagtgttctcctccactagggcatttgttgggacagggttaactgtaaggtcaggactctgagacaagcgctgactcctcctatttctctccacagctgctggctgaatacagagacagggttcatctggagtttcttggggccagtttgcacagttatagtggtaagcaaatactacaacagcctggcgaagtgtgttctgaaggaggagcaaggagacctgcgagatctggaatttccagggacgtgtgcagctgagagggtcacttattcccatcaaaagttctcctttccaggccgggcgtggtggctcacgcctgtaatcccagcactttgggaggctgaggcgggtggatcacctgaggtcaggagttcgagaacagtctggccaacttggcgaaaccccatctctgctaaaaatacaaaaaattagctgggtgtggtggcgagcacttgtaatcccagctacttaggaggctgaggcaggagaatcgcttgaatccaggagacatggaggttgcagtgagccaaattcatgccactgtactccagcctgggcaacagagtgaaactccgtctcaaaaaaaaaaaaataaataaataagttatcggccaggttgcggtggctcatgcctgttatcccagcactttgagaggcccaggatcacttgaggtcaggagttcaagaccagcctgaccaacatggagaaaccccatctctactaaaaatacaaaattagctgggtgtgttggcacatgcctgtaatcccagctactcaggaggctgaggcaggagaggagaattgcttgaaccagggaggcagaggttgcggtgagccgagattgcgccattgcactccagcctaggcaacaagagcaaaactccatctcaaaaaaaaaaaaaaaaagttctcccttccaatccttcattcttgagatttcgaagttacagagtaatttctttgacttgggaattttgtttttccttctgaaaggcaaatacccctgggagggaccataattgtatccgtcttgtgcacaggtccatgagtctctctgaagcagtgtcattgtctgggggtaataatgcctgaggttcgttgcctcatgctaaggaaatcaaggacacagacacacacaaggagtgagtttaagagcagaggtttaataggcaaaagaaagagaaaggagactagctctctgtgtcttgcaagagagagggcctcctgagtgggacttctggcccgcagcaaagtgcaacagattttagactggcttgagggggcggtgtctgatttacatagggcccaaagattggttggacccagtgtgacatttacgtagagcgcgaggaagctggccacccaccctgatcttttattatgcaaatggggtctttacttggctggcaccatgttgtcttctccttactgtctacatggtttacaaagaaaagggaagacggagctgccattttttttttctttttttttagacggagtctcactctgtcacccacgctggagtgcagtggtgcaatctcggctcactgcaacctctgcctcctgggttcaagcaattattctgcctcagcctcccgaatagctgggattacaggcacgcaccaccacacccggcaattttgtatttttaatagagatgggttttcaccacgttggccaagctggtctcaaactcctgacctcacgtagtttgcctgcctcggcctccccaagtgctgggattacaggcatatgccactatgaccagctaatttttgtacttttagtagagatggggtttcaccacgttgaccaggctcctaacctcagttaatccacctgcctcagcctcccaaagtgctgggatttcaagcgtgagtctctgcgcccagccagagctgccattttgaacatgcctattccccaggtaaccgctttcctattggcacaactgccagcattcacccatgcaagcttctagcttgcctttctatgtctatagctcgattctaccggctgctctccattagaaaagaaaatgatttgggagctgcttttcattaaaaggaaaaccttaccgaggacttccttaccctcactatctgcctaaataaatcttttttaaatcctatgtcatctcctaggcacagatgttgaatgaaagaaaaagtaaaaagaaattaggaggaattgtgggggaaggagtgagatgacagagggaaatggtggatcgaggcaaagggaggccagggaatgttaaacacccatctctttgcctcccaacctccatccagacttgacagccctgccagatgatgattcttctgactctcactcatggtggctcattcccttatgtcttttgtcatatttttcgaggattaaatttttttttatttttaatttttgtgggcacaaagtaagtgtatatatttatggggtatatgaaatattttcatacaggcacagaatacataataatcacatcagagtcaacgaggtatctgtcccctcaagcatttgtcctttgtgttacacacaatccaattatgttcttctggtttttgttttgttttattgtttggtttatttttatttttattttgagacagagtcttgctctgtcacccaggctgcagtgcaatggcatgatctcagctcattgcagtctctgcctcctgggttcaagcgattctcctgcctcagcctcccgagtagctgggattacaggtgtgcgccaccacgcccagctaattttttgtatttttagtagagacgggatttcgccatgttttccaggctggtctcgaattcatgacctcaggtgacccacccgcctcgacctcccaaagtgctgggattacaggcatgagccactgtgtccagcctctcctggttatttttaaatctacaatgcaattattattaactatagtcaccctgttttgctaacaaatactagatcttattcattctttctatttttttgtacccattaaccatcccctcttccctgttccccacccaccccttcactatccttcccagcttctggtaactgctgttctactctctagctccatgagttcacctgttttaaatgtttagctcccacaaagaactgagaacatgtgaaatgtgtctttctgtgcctagtttcatttgtaatgtttacttgactgatctaagtcttgggaatgcttgaaattatattcctccacagaggttttgtgctgatgtctatcagattttttttaatggggggcatgtattaattttcaggggtcaccgtaataagctactgcatgctgggtggcttagaacaacagagacttgttgtttcacagttctggaggcttgaagcctgaaatcaaggtattggcagggccacgctccccatgacaacacgagggagggtctgttccagacccctctccaacaaattttcccatttgtaagatcaccggccaggtgcagtggctcatgcctgtaatcccagcattttgggaggccgaggcgggtggatcacctgaagtcaggagttcgagaccagcctggccaacatggcaaaaccctgtctctactgaaaaatacaaaaaatgagccaggcgtggtggcaggcaccaatagtcccagcctcgggaggctgaggcacaagaataacttgacccctggagggagaggttgcagtgagccgagataacatcactgcactccagcctgggtgacagagggagactgtctcaaaaaaaagaaaaaaaaaaaggaacactagtcatatttcagtcagattagggtctgccctaatgagttcatcttaacttgattatttctgtaaagattctatttccaaataaggtcttggggcgcctggccccaacagacagcctcttaagctcgttaagaaaataaaaacaaatcttcagaggccataaattagacagcagtaatgaaccagaatgctgtagctgccctaagggtatttcctaaaatcaagaatctaaaaccttggagattgaatggtcatttgtggagttggatgggcaagccctagggtctgaagaaggtgtagagtccaccaaataaaataaagaccccattcttattgaaagggtggactagaaaataaaattctgggccgggcgtggtggtttatgcctgtaatcccagcactttgggaggctgaggcaggcggatcacgaggtcaggagatcgagaccatcctggctaacatggtgaaaccccgtctccactaaaaatacaaaaaatcagccaggcgtggtggtgcacgcctgtagtcccagctactcaggaggctgaggcaggagaatggcgtgaacctgggcggtggagcttgcagtgagccgagatggcgccactgccctccagcctgggtgacagagcaagacttggtctcaaaaaataaaataaaaataaataaataaataaatttaaaaggctatctgttggggttcctccagcatttttggtgttttgtagcgagagggattttcagagtgagattcctaaaactcaaagttgatcctgatgctcttctgtgtgaaactgttctatagcttctccattgcactcagggtgatgtccactccctgagcctgacacctcagatccttcactgcctggccctacccaacttccctagggtccctttctggctttttcctgcctgctcggccctctggctgtaccagccaactttctacttccttgaaatgccaagttctcccctctagacctctctcatggaggtggtggtgatgatgaacaaaccatatgtgtgagatgcttagtacaatgccaggcattgccaagagtgcagtaaatattaggtatgaacaatcatggaaataataattatgatgatgttggccagacatggtggctcatgcctgtaatcccagcactttgggaggccaaggcaggcagatcacttcgggtcaggagtctgagaccagcccggccaacatggtgaaaccccatctctactgaaaatacaaaatttagccaggtgtggtggcccgcgcctgtaatcccagctactcaggaggctgaggcaggagaatcgcttgaacctgggagacagaggttactgtgagccgaggttgcgccattgcactccagcctgggagacaagagcgagactccgtctcaataataatagtaatgcaatgtttatcttacccattcccaaatcttcaaggacattgggctttcttggaagttctactcatctggaaaaaataattcccctggggccgtgattctccactggtgcagttttccctctaaggggaagttggcaaagtgtgaagactttttttttttttttttttgagacagagtttcgctcttgttgcccaggctggagtacaatggcatgatctctgctcattgaaagctctgcctcccaggttcaagcgattctcctgcctcagcctctgcggtagctgggattacaggcatgcagcaccacggccagctaattttgtatttttagtggagatggggtttctccatgttggtcaggctggtctcgaactcctgacctcaggtgatccacccaccttggcctcccaatgtgctgggattacaggcatgagccaccgctcccgaccagaagacatttttggttgttacaactagagaggtgggttctactgccatttagtgcatagaagccagggatgctggttaacatcctaccgtgcacaaggcagcccccttctccccgctgcccccacacaccaagaatgctctgacccaaatgtcagtattgccgtgggtgaacaggccctgcgccaggtgtatgtatatcttgctcaggaatgcttttgagggagggctttagaagataaactcaagataataaactccactcaagttcgcagtctatgtcctaacgtactggatgcactttgggaaaatacacagagaccgccccattgagaacaagcaaaggctgtttattccgagatttctgtagtccagtagtacgagagtcagctaccatcatcactcgcgttggctcagactcaaaggcaggcagagaagtggggaaggtttatagaggaaaaaaagagaaggctacaggtaagtcctgcttggaggctgttgcacggatgggcaagctgtaggtggctaactaggagcggggtatcctgtgtgattggttaggggtacctattggcttctacctgttggtcctaagttggaagtagggacaaaaattaaggaagctgtcaattactaactaagtcctgctgtcttggttcaattgctgcatggatcattctttggctttctggattggttgctataaatcgtgggtcagaattcttcttcttcttcttttttttttttttttttttgagacacagtcttgctctgttgccaggctggagtgcagtggcacaatctcagctcactgcaacctctgcctcccaggttcaagtgattctcatgcctcagcctcccaagtagctgggattacaggtgtgcaccaccacacctgcctaatttaatttttgtattttttttttttttttgagatggagtctcactctgttgccaggctggagtgcagtagcacaatctcagctgtctgcaacctctgcctcccaggttcaggtgattcccctgcctcagcctcctgagtagctgtgattacaggcatccaccaccatgcatggctaattttttttttttttttgtattttagtatagacaggtttcaccatgtttgccaggctggtctcgaattcctgacctcaagagatccgcccgcctcagcctcccaaagtgctgggattacagacgtgagccaccacgcccagcccagagttctctttttataggtgttctggcccttgtctatttgtatatccagtctctccatccttctgcttgactttgcagatcaactcccttctcctgacctggaccttgtggatcctgaggcagaggctttccagtgttaatgccgaagtctcaacgctaaaagacaccaggtaaagccctctttcacctccccccctcttttaatttcctctttcttcttcccagaaaagttctttgagcacttcttgtgtgctgggtcctatgcctgagacagaggtgatgaggtctgtttagcatatcacaccatctagatctggaggcttaaagtccagctcaactatttacgagctgtgtgaccttaggcaagttacgtaacctctcagaagcccatttgcctcacctacagaatggggatattaacattgcttattttaggtgccttacaaagcatttagcacggttactaggaacagtgagtgtttcatatactacaactcttaataaattttctaatttttctctgtgtatacttatatgtgcacatttacaagaaactgaatcatactattttgttttttatggttttttttctctcgagaatgtcctgatgatttctgacttcattagatattattctacaatatggtgtaaatttgtagcacattgtatttaagtcataccatattcatggacacttaatttgcttctatgtgtttttggttttggtttgttctctgtataaacaatactgccttgagcacccttgtaggtaaatccttccacaccatggttatttaattacaacactaaacatgaaactacccaaatccaactgcctgaagagtaggttggactgtaatgcttttagaatgtgcgtcgtaaattgattttcagaaaatttgtttccgacggtgagaatacctatttacttgcaacattgtcaacactggagtttattgtttttgatgtattttctgctgatttaatgcgtgaaatattctatctcattacttttgttatacatattttatattagggatttgggacttcttaaatatttttacaggtcaattgtgtttcctaacttccccactcaactactgttcattttaagaaacttcagcaaccatcatctaggttttattgtcagtaacctaataacattctttgcttcttttttcttcggtatccaatcccttatccattttaaatatgtttgaaaagttagtacaaaagtcaaaaaggaggcctggtgtggtggctcatgcctgtattcccagcagtttgggaggctgaggcaggtggatcacgaggtcaggagatcgagatcatcctggctaacatggtgaaaccctgtctttactaaaaatacaaaaaattagccgggcatggtggtgggcacctgtagtcccagctacttgggaggctgaggcaggagaatagcttgaacccaggaggcggagcttgcagtgagccaagatcacgccactgcactccagcctgggtgacagagtgacactccatctccaaaaaaaaaaaaagacaaaaaggtaaaacaaagttgatacatacacatactcatagcagaaaatgtaagcaataagtttcacatcagatgaaattcaccattttaaccattttaaagcgtgtaactcggtggcttttcgtacattcacagtgttgggcagtgaccgccactatctagtggcaaatccttgttttttttttttttttgagacagagtctctctctcgcccaggctagagggcattggcacggtctcgactcactgcaacctccgcctcccaggttcaagcgattctcctgcctcagcctcctgggtagctgggattacaggcatctgccaccgtgcccggctaatttttctatttttagtagagacgggttttcaccatgttaaccaggctgggctcgaactcctgtcctcaggtgatccaccagccttggcctcccaaagtgctgggattacaagcacccaccaccacacccagctaatttttgtatttttagtagagatgggttttcaccatgttggccaggctggtctcgaacttctgtcctcaggtgacctgcccacctcggcctcccaaagtgctgggattacaggcttgagccaccgcacccagcctgattgcatttaaatgtctataggatttgattttgcaacacctaggcttggagaccccaccctacatttgtccacacctaggtggcaaattggagagtggccacctcagaccattcctggaagtgtggcctgcaaggacaatagccacctcccagagccttacatgctgtacatcttctccccaggttactgaccttcaaggcctttgcccagctcttcatcctgggctgctcctgggtgctgggcatttttcagattggacctgtggcaggtgtcatggcttacctgttcaccatcatcaacagcctgcagggggccttcatcttcctcatccactgtctgctcaacggccaggtgtgtagctgctgccctccccatccccctcctcccatccccctctccccccttccccaccgcatccctccacccaacatccctgtcactggaccatttccctgcatctggatgatgtgtctccttctccaggtacgagaagaatacaagaggtggatcactgggaagacgaagcccagctcccagtcccagacctcaaggatcttgctgtcctccatgccatccgcttccaagacggtgagagactgcatgctccctgcaggtgctggtcgagggaggtgccggcctcttggtgacactcagctctgccacgtgttgggtactgaatgggagctgagggtgcccaccctagttagctcatggatgaagtgtggagttgaagactggggatttatatgtatatattagcagacacacacacattatctatctctctatttaaataaaatttcaagaataagacatatataatttataacagatttacatagatacatttgtatatgaattatgtaacatattaaaaataatacatatttatatgttatgtttataaaatacatttatatgcacttattatatacatataatgtataatattatatacatataaatgtaagatgtaagtttaaatatagataccggctgggcgcggtggctcacacctgtaatcccaacactttgggaggctaaggtgggcagattacctgaggccaggagttcgagaccaacctggccaacatggcaaaacccccatctctattaaaaatacaaaattagccgggcatggtggcaggtgtctgtaatcccagctactcatgaggctgaggcaggagaattgcttgaacccaagaggcggaggttgcagtgagcagagattgtgccattgcactccagcctgggcaaaaagagcgaaactccatctcaaaaaaaaattaaataaatatagatatcttcacatgtatatttatatagagaaaatttttatgtattatggataacatttatatatgtagattttcaggaatattgaaatattggaatgaatatgcaaatggaggcaaagctggttttcccactagaatgtcttatttttttcaacaatgtattccacgcccctaaaatgctgtctagcacacagtaagttcttagtgaatattttctgagtaaataataattcaatagcttagtttcctcactgataaaatggggataatggtaatccttaccttggaaggttatactagatattagatgaaccagtatgcaatggggttggaagagtgcctcggacatagcaggatctcagtgttaagccttgcagaagtccagtgaggtaggtatcactgctctattttcttttttctttctttctttctttctttttttcttttttttttttgagatggagtctcgctctgtaacccaggctggagtgcagtggtgtgatcttggctcattgcaacctctgcctcctgggttcaagcgattttcctgcctcagcctcccaagtagctgggattacaggcgcccgccagcacacccagataaattttgtatttttagtagagacagggtttcatgatgttggccaggttggtctcgaactcctgacctcaggtgatccacctgcctcagcctcccaaagttctgggattacaggtgtgagccaccacgcccagctggtctattttcattatgaggaaaccgaatgtcatagaggttaagtccagtgatttcagaatgagccacaggaatcaccccactggaaaaattgcccatatcatggatgacatattctcttggcaatacatttttaaacataatgcagtttactatagttttaatgaaaaagacagtataggtatagaacattttagaaaacatttgtaagcattgaaaacaaataaaatttcccattatcccaccacatacagatcccagtgagtcatatttttggatgcaagcaccttagatccagtggcttaattaaatagggaaatgattttccttgcaagaagtccagaattaggtgttgcgaatattgctggtgttgctggttctatgcttagtggtgttgtaaaggctctaaactaagaatctgggttttccccagttttccattccaccatcaacatgttgacattttattgtattttcatggttgcaatatggttgccacagctccagacatcatgactatgttcaagtcaagaagaagagggatggacaggaccagaaagcccttctttcatgtctttgtctttaacagtaaatgaaagcccagaaaactctcagatttccctttacctaattggtcagaagtgtatcatgtgaccactcatatgggcaaaaaattttgaaccaacagctgtttggcttcctaaagtccagagtgggcgctgtcaatgctgaggaggttgagaatggcttttgggttttccaactctgcctgccacactagggacaatcgcatttaacattttagtgtttatccttctagtctttgttactgtatttttaatacttctgtccctgtagacatgacccttggaatcacgtttgtattaattctgctgcagactctgaggaaattcttttctctctcacagggttaaagtcctttcttgctttcaaatatgctatggagccacagttgaggacagtagtttcctgcaggagcctaccctgaaatctcttctcagcttaacatggaaatgaggatcccaccagccccagaaccctctggggaagaatgttgggggcggtcttcctgtggttgtatgcactgatgagaaatcaggcgtttctgctccaaacgaccattttatcttcgtgctctgcaacttcttcaattccagagtttctgagaacagacccaaattcaatggcatgaccaagaacacctggctaccattttgttttctcctgcccttgttggtgcatggttctaagcatgcccctccagagcctatcatacgcctgatacagagaacctctcaataaatgatttgtcgcctgtctgactgatttaccctaggataaagactctttgtgattttaaagaaatggtcagtaaaactgtaatgagagtcccagggaaccaagacggcacatagacagataagctactttggcacaaacacttaaaaatagttgtgttggtaagtagggggatgtttgatgtagcagaattctagcactccctggagggttgaagcacttggtgacaacaacctttggaaagtgctttggtttcctgaggtccttcaggtaaccaagacctccctgttttctagaaactttctaatgacttggctaggatttaggattttctctatcacagttatcgctacctatccttaattttttttttttttttgacagagtctcggtctgttgcccaggccagagtgcagtggcatgatctcggctcattgcaacctctgcctcccgggtgcaagtgattctcctgcctcagcctcccaagtagctggactgcaggcgtgcaccaccacgcctggctaatttttgtatttttagtagagacggagtttcagcatgttggccaggctgatcttgcactcctgacctcagatgatccacccgcctcaccctcccaaagtgctgggattacaggcatgagccactgcgcccggccaccatccttaaattcttgagcttgggagagaagaagatgaaggtttaaatgcaggtattttcacttctatgggcactgtaaaacctcccaatccaaagcgtggtccctggatcatcagcatcacctgagagcttgttagaaaagcaaagaagaatctcagaccccactccagacctcctagatcaggacttgcatgttaacatccccaggggatgaatataaccatgggtgtctgaaaagcactattgtagaacattcttctgtttgccatgctgacagcagagcttgtctttaaagccagagagaaatgtcttcttcttgacttggaccctttgcatcttctcttagaataacttccctgaaaactcaattgatgtcttctgtctctttgagttgcagtgtagtcatcccctctgctaggaagcattctttgaatctcctacagtagaatttggcattatttttgtgtgtgccaaaaagcttcatgctttctcaccctgtattatgatttctctttttgttgggtgtctccaacatagactgtgagcttcgtaagtacagagatttgcattaagtagcgtctcaacaaatatgttgaatgaatgaatgaatgaatgattagaatgattactcttcattttgaagacaggggaactgaagctcagagaggttaagtgactatcccaggatcacacagccacataggtcgttgagctgggttttgagctcttgaccataaagctccttctccagatgccttgttcccctttttctcttcctttcgtgccaggaatacttagtttagggttacagagactagaataatatttactctgagtcacctaagcagttaggattcaattagctcagtcatatcatgcactggacaatttgttaacaatattaaactcagttgatggaggctctgtctttgttattcttggcagcctaacttgggaggtgggacacatgtttgtgaacaagagttcatctatgataaattagtcttcaacgcttggcttatccagagtgctcaatacagaggtgatagttcttagagagatggaagcaagagatggcactgctcctatccatagccaattgtcataggtcaatggcatcaatgggcccaataatggtctccatttagccacatccctttcctgtaactttgtaactctctccttgtctgactctggggttggacttgagatttgctgcagccagtggaaggttaggaaatgtgactggaacgtaagtttcaaaatcgtatgtgtaatccttcttaccagttacacgattacatttgctcaccttgcttccttacccccaccatgtgaacatgcccaagcccgcctgctggagggacatgagaaacacagaatgaagggtaagtcaccgcagttacactggtggaggttgtcctcagccagccaccatgccaacttgctgctttaatcacaggagagagcccagccaacatcagcagacctgctcagccaacccataaacagactgaggagcagcaagaaagtatcatttttcagacactgagtttcaggagttatttgttatgaagcatttatttgtagcaattgctgatggatacaacaaccaaagtatggtcaacattctgcattggactgcaacaatttggaatgtaaaaagaaagaattttgatctcaatttcttctgagatatcaggataataaattctgtactacttgaataaagttttttcctgagagaagatttgcctaaggctttgtctgtctgtacaacggtgttacatgttggtctgaaatatagtcaccttaagaagctctatatttctaaggtaagtggataaaggtgtgacctccatgcaggatttttttcgtactacacacatcaagctatacttggtacattttttttacccttgtggtctcatatgtctccgctagagggagaaaggagacaattaaaaaaaaaatgcggcccggcgcggtggctcacgcctgtaatcccagcactttgggaggctgaggcgggcggatcacgaggtcaggagattgagaacatcctggctcacccggtgaaaccccgactctactaaaaatacaaaaaaattagccgggcgtggtggtgggcgcctgtagtcccagctactagggaggctgaggcaggagaatggcgtgaacccgggaggtggagcttgcagtgagccgagatcgtgccactgcactccagcctgggtgacagagcgagactccatctcaaaaaaaaaaaaaaaaaaaatgcatgagtagaagaaatacgttctgaagttcactggtagagtagggtgactattgttagcaacactgtattgcatatttcaaaatatctagcagagaaaacttgaaatgtttccaacagctagaaatgatcaatgatcaagatggtggacaccccaaataccctgtctttatcattgcaaactctgcatgcaacaaaatatcacatgtaccccataaatatgtacagatattatatatggaaaaccctaagtggctgcaaatcccatgaatataatgtgaaataactttgctatcttataatccaaataattgtgtacagaaaattacagatccattcactcaaaaaatatttattggccgggtgctgtggctcacgcctgtaatcccagcactttgggaggtcggagcaggctgatcatgagaccaggagattgagaccatcctggctaacacgatgaaaccccgtctctactaaaaatacaaaaatcagccgggcgtggtggcgggcgcctgtagtcccagctactcgggaggctgggacaggagaatcgcttgaatccgggaggcggagcttacagtgagccgagatcgcgccactgcactccagcctgggtgatagagtgagactctgtctcagaaaaaaaaatgtattgaccacctctattgtgcttccccctcaaacactgaagtagttaaaaacattgaaacattgaaaagtaattattttagaacctaaaaagtattttaaatttaagtattttatagttcccaaactagaattattaaaattatactttactggttctaatggaagtaaactcatcaataacagtttttaaattggtgtctgaaaagaaaaatcattaaaaaaatattatttggccatacaaaaggagattcctgccatttgcagcaacaagaatgaacctagaggacattacgctaaatgaaataagccaggcacagaaggacaaatactgcatgatctcatatgtgaaatctgagaaaatcaaacacactgaaagaatagaataacggttatgaggaacagggatgaggtgagggagaaatggagagaagtaggtcaaagggcacatagttgcagttatgtaggaaaaataagtttagaaatctaatgtacagcataaagactatagctaatgatattatattgtatttatttcatttatttggatattttctctattttcttagtctagctaaaggtttgtcaattttatcttttcaaaaaaaccaactcttcttttcattgattttttgacttgcttttcgtctgtattttgtttatttatgctctgagtcttattatttacttccttttaccaatttttggcttactgtgttcttattcttctaattcctcggggtgcacagttgggttgtttattagaaacctttcttctttttgaggtagggtgtttattgctatgaactttccttttgctatgtgttaggggtttctgtatgatgtgtttccattttcattggtctcaaggaatttttaaatttcccttttaatttcttcaatgagccatcagttatttaagagcataaggtctaatttccacatagctctaagttttccaaggtttttatagttgttgatttttagttttattccactgtggtccaaaaagatacttgatatgatctctatcttcttaaatatgttaagacttgttctgaccaggcgcagtggctcacgcctgtaatcccagcactttgggaggcccaggtgggtggatcatgaggtcaggagattgagaccatcctggctaacacggtgaaaccccatctctactaaaaatacaaaaaaaaaattagccgtgcatggtggcagacacctatagtcccagctactcgggaggctaaggcagaagaatggcatgaacctgggaggcagaggttgcagtgagctgagattgtgccactgcactccaacctgggcaacagagcgagagtctcaaaaaaaaaaaaaaaaaaaagacattacatggacactaacatgatctatcctagaaaatgttccacgtatagttgagaagaaagtatactcttcactggttggttggaatgtcctgtaaatgtgtgctagacccatttggtctatggaatagtttaaatccatgtgtatttgtttatttcttgactagacaatctgtctattgttgaaagtgggatgtcaaagtcccctataagtactgaattgcagtctatctatcccttagatataataacatttgctttatatatttggatgctttggcgttgggtgtatatatgttgatgatggttatagcctcttgttgaactgctatatcttttttttttttttttgagacagagtcttgctctgtcgcccaggctggagtgcagtggtgctatctgggctcactgcaagctccgtctcctgggttcactgaactgctatatctttaacattagctaatgatcttctttggttctttttgttacgatagtttttgacttatcatcaattttatctggtataagtatgacttataccactcacttttggtttctctttgcatgatatatctttatccatcccttcactttcagtctgtttgtctttaatggtgaggtgagtctcttgtaagaagcatacagtttggtcttttaaaaatttcattcagccactcaatatattttttttctttttctttattttttttttttttgagatggagtctcactctgtcatccaggctggagtgcagtggtacaatctctgctcactgcaacctccacttcctgggctcaaacaattctcctgtctcagcctcctgagtagctgggactaccggcatgcaccaccacacccagctaattttttttttgtatttttagtagagacggggtttcaccatgttagccaggctggtctcaaactcctgacctcaggtgatccacccacctcagcctctcaaagtgctgggattacatgcatgagctactgcacctagccccaaatattttaaaacttttttttttgaagctcttcatggtaatctagggtgtttatgtgtcataaagtatttaatcccagtttgtatcatttctaaattttcagtgctataaacaacactgtaatgaacatctttgagctaaaattttaacactctactgcataagtgactttaaaattagtaataggttataagtgggaagaaatttatatgttccccttagtgtttgattaaagacaaacatttttcactatacaagggctgccaaaactttcccaaactgtaaaaaacaaaccattagaggctgggcatggtggttcatgcctgtaatcctagcactttgggaggctgaggtgggtgaatgacttgagcccaggagttcaagactagcctgggcaacgtggcgaaaccctgtctctaccaaaaatacaaaaattagccagtctcataactggtctctaaataaataaatagataaaaatttaaaataaaataattttaaaagtagccattagaaacatagtaatttggctgggtgtggtggctcacacctgtaatcccagcactttgggaggctgaggcgggtggatcacaaggtcaggagatagagaccatcctggctaacacagtgaaaccccgtctctactaaaaatacaaaaaaattagccaggcgtggtggtgggtacctgtagtcccagctactcaggaggctgaggcaggagaatggtgtgaacctgggaggcgaagcttgcagtgagccgagaccacgccactgcactccagcctgggcgacagagcgagactccatctcataaaaaaaaataaataaatagaccaatatagtaatttgaagtttatttaatttttgctcccagaaaatctttccatcatcagttctaagccatctggttgccttctgatgtgacctttctgttccattttgcctaaagttattaactttttatttgtaatacttggtatgttggatcaatttcagatgagttcattgtctcatttatctctgtaagtttactatccagcagaagattggggtcactgattgggttaataatatttgttaaatgaatatatccaggaaagagagtgtgtctatctactgcacagcaacagaacactattctgatattctgtgtcgtgaagtgatcactcttggttttataaataacagattctgattttcagaatcttcaaaacagatctcttttgtttaattttccagtaacaataaccctgtgctcattctattactaatattactatttataaaatgacaataagtgattgaggtcaggtgttctaaaagcagagcctgagaccaggattgtggtgcccatgatttactgagggagtgcttggaggagaaaagtgagggagtcaggatggggttgggaagttggagggtaaggctatggtctcagctggaagtgattgcagcctgatctccggggagcgctggagcatgagtcatacctcagagttggtctcactttgagtcaagggcccaagccttgtttatgcctgtgtcagtcaattattggctacattgccccgacaatggtagggcagtgcgtcaccttccagatggagcacttcctgttcagctgaaaccagtttcctggagaagaggatgggggctgaaaaggaaattaggaacgggcagcaacagtaccagctactctgctcatgatcatcaaatatgaaaaagaaagctatgagtcccttagatacttgattgaagttcactgtcatgagattttgaactgcattcaaaaaagagtattgtttctaatgatattgcaaacttcttagacattccagtaagcatttcacttactaaaaaaaaaaaaaaaaaatttttttctgccattcacttagacttctttttttaatgtttattttaggttcagggttacatgtgcaggttagttatataggtaagttgcatgtcatggggatttcatgcacagactttttttaatcatccaggtaataagcttactacctgataggtagttttttgatcctctcctctcaccttccaccctcaagaaggacctggtatctgttgtttgttcccttgtttttttgtttttgagatggagtcttgctctgttgcccaggctggagtgcagtggtgtgatctcggctcgtcacaacctctgccttccgggttcaagcaattctcctgcctcagcaggacacccaatcccagggaagttcaaagctaacataagatagaattcagttattcccctagttccttgtaattgaatagaaacattttaccaacttatgttaatattatacaattttaatccctggatattggaactgggtctgactcactaactgaaaactttcacgttttgtgctattcacaatagcacgtttcagagctattgtttttctcatttttcttgccctaaatcacctcagacatctgcatttattactgcaactttgtccttacctataaactaatccctagaccaatggttttcaactgggagcatttttgttcccaggtggcaatgtctggaagcatatatatatacattatatatatatacacattatatatatatatacacattatatatatgcacattatatatatatacacattatatatatatacattatatatatacacaatatatatacattatatatatacattatatatatatgaaataaaaaatatatatttcaaataaaaaatatatatttcaaattaaaaatatattttttcaaataaaaaatatttatatttcaaataaaaatatatatatatatatttttaagacagggtctctctctgtagcccaggctggagtgcagtggcacgatctcggctccctgcagcctccacctcctgggttcaagcaatcctcccacctcagcctcctgaatagctgggattataggcgtgagccactgcacccagctgatttgttttgtatttttagtagatacagggtttcaccatgttggccaggctggaactcgaactcctggtctcaagtgatccgcccacctcagcctcccaaagtgccagcatcacaggtgtgaggcactgcaccccccctctggaggcatttttgattgtcatgactggtggggaagtgtcactggcacctactgaataaggccaagctgcttctaaacaccttacaatacaaagaacaaccccttacaaataagaaattatcagccggcgcagtggctcacacctgtaatcctagcactttgggaagccgaggcaggtggatcacgaggtcaagagatcgagaccatcctggtcaacatggtgaaaccccgtctctactaaaaacacaaaaattagctgggcgtggtggcatgcgcctgtagtcccagctattcagtaggctgaggcaggagaatcgcttgaacccgcgaggcggaggttgcagtgagccaagattgcgccactgtactccagcctgggcaacaaagcgagactccgtcgcaagaaaataaataaataaataaattatccagcccaaaatatcaatagcgcagagtttgagacataataattaggtggaggccgagaatatttaatgtatcatctctgccattcttgccttcacgaattttctaattcagggaggcaggatttacaaacacacgtgacatcatttgtgaaacagcacaccatgtagaagggtaagtcatgttgtacagacctgaataaattgagtttaaaagatggatttatttgaaagcctgaataagaaatcggttttgaaggaagcagaagccagattggctcttaaaaagaatggaaaagaatgagagaggcaggaaggaaagaaagcagccgaccgggagtggtggctcacgcctgtaatcacagcactttgggaggctgaggcgggcggatcacctgagctcaggagttcgagaccagcctggccaacagggagaaacctcatctttactaaaaatacaaaattagctgggtgtggtggcgcatgcctgtaatcccagctactcgggaggctgaggcaggagaatcacttggacccgggaggtggaagttgcagtgagctgagattgtgccattgcattccagcctgggcaacaagagcaaaactccatcaaaaaaaaaaaaaaaaaaaaaaagagagagagagaaagaaaaaaaaaagaacaagaaaaaaagaagaaagcagccttcaagttggaagggaggaaaaatggccaatagaggagtctgaattcaaatctgcaacacctagaatacatggcttatttattctgtctttcttcaactgccatggaccagagagcaatcgcaacatgactaggaattcggcacaagggtttctcagctgcccaggaatattgcattttacgaagcctttattcgtgtacatttgaaattatgcaaaacaaaaagttgcgctgcatgcacacattttgcaaccatgtgaatatcccttcattttcccttttccaaaggaatcccataacttcaaagccagcaggtggagtggatgtacactactctgtttatatctatggaggagacatttgctttaattaagcagaaaagtcctcaaccctttgtctgcaaccctagaagaagacctcacatgattttctttttttttttttttttttgagacagagtaccacggcctcccaggctggagtgcagtggtgcaatcatagctcactatagcctcgaattcctggggctcaagcaatcctaccgcctcagcctcctgtgtagtggggagtacagcaatgcaccactatgcttagctaattttgtaaattttttgtagatatggggtctcactatgttttccagggcgtctcaaactcctggcctcaaacaatcctcctacctcagccccccaaggtgctgagattacaggcatgagccaccgcgcctggtttgaaatttcttcaaataaatgatgataactcttgcctattttaacattgacagtcattagcatttaaaatctttttggagctgttctgtcataacaatcatccacacatttattaatatgctgaaaacatacctaaaaaccagtaactttgtaaaagtaattagacatggtaaaacgaaaaaatgagtccgaatgacccacgttttttgtttccagacatttgtactgggacatgttcaagaggacactaagaaaacaaaatgatctttaacccatgtgtacatgtaggttccaaaagtctcaggcagaccgggctaggtcgctcacacctgtcatcctagcactttgggaggccaaggagggtggattgcctgagacgaggagttcaagaccaacgtggccaacatggtgaaaccctgtctctactaaaaatacacaacatgagctgggcgtggtggcaggcgcctgtaatcccagctactcaggaggctaaggcaggagaatctcttgaacttgggaagcagaggttgcggtgagcagagatcatgtcactgcattccagcctgggcaaccagagcaaaaccctgtctcaaaaaaaaataaataaataaataaaaaagtctcaggcaaagaaaatggggaaaatgtcagtgtcttggacaaaagagcctgcgcagtgacaatacacccctaagctaggatgataatgcatttttgtttttggttttttatttatttatttatttattattattatactttaagttttagggtacatgtgcacaatgtgcaggttagttacatatgtatacatgtgccttgctggtgtgctgcacccactaactcgtcatctagcattaggtatatctcccagtgctatccctccctcctccccccaccccacaacagtccccagagtgtgatgttccccttcctgtgtccatgtgttctcattgttcaattcccacctatgagtgagaatatgcggtgtttggttttttgttcttgcgatagtttactgagaatgatgatttcccatttcatccatgtccctacaaaggacatgaactcatcattttttatggctgcatagtattccatggtgtatatgtgccacattttcttaatccagtctatcattgttggacatttgggttggttccaagtctttgctattgtgaataatgccacaataaacatacgtgtgcatgtgtctttatagcagcatgatttatagtcctttgggtatatacccagtaatgggatagctgtgtcaaatggtatttctagttctagatccctgaggaatcgccacactgacttccacgatggttgaactagtttacagtcccaccaacagtgtaaaagtgttcctatttctccacatcctctccagcacctgataatgcatttttgtattgcaaaatgcaacaccctctttaatactgatccatatgaaaattgttgaattatgtgaatgtggagtgttaatgtaagatctttgggagcataaaatacagcagagaggccagaaagggaactatgagctgaatccagatgccagttagtgagtttctggcaaggtggcagtagctgcaagaagaaaatccacttctcccgcccgccatctttaaaatgcatccttccgacacttcattgcacgtgccacactactggactctggatctaagaattctcccaaatgtcttgttctttctatgaacataaaaagccaaaataggtgaatgagcctagacttttcacaggaaagctagaaatagtggcatttgtccaatctatgtgtgaccacaggggcgctgtagacaaacggaaaggagcggtaacttccgggtcattgccatggcacttgccaggtcagttcatctttagccaagcagcagagacgagatgaacctgtggctgcggttgcttggttgactctgcagatgatgatgcagtgcctcctttatgaaagatttctgaggacttccccacttcttcctacttgcggggaagataataaggagaaaaggtgacagagaaattaactaaaacttctaacttgcccagagatgacaagctaggatttctgttaggtccaaagctcaatatctgacattacaacttcccatcctccaaaaaaaactccaccatctaataatggttattttatttgatcttttcacaaacatttacaggggcttcctgtggtgccaggcagccttctaagcgcttaacttatttgacatcatttaatcttcacaatgagaagtgctacccttgctaagaagctctttatcccaaataaagctcatatctttgtaatagctccatggtcttagcattcaggctgccgcaaggggcaaacccagtttcacgagtcacagcacttaggaatctgtggtttctgaccaaaaagagtctcttcctagccctccaaatctaggtaatttcacaaaccggaggtcgtttttatcatacacagccttcagatttttggtcaagtgccagcttcttgtagtcaccttatttaaaactggaatcctcccaccctgtcattcctggctgctctccattgctctattttttctaaagcatttatcactttctaataccataaaattcactttttggggtctgttgtcagttccctcacccaactagaatgttagctctgtgaggtcaaggactactgtcagtgggtccactgatggttctccagcacctaaacagtgcctggcacatagcggacaataaataggtgttaaatgagtgttgttaataaattaaactttttttgttaaatatcccttggatgtttgttgaaggaagaaatgaaaagagagaggaagagaaggagggagtgatagaaagaatgaaacagagagttagaaacgagagaggaggaagggagagaaaaagatagatggtgtaaaagagagtgagaaagaaataaaacgtaaggaaggagagggaaaccaggaatgagggagaggaagagactgagagagagcaagaaaaaagggagaaaaggaaggaaggaaggaggaaaggagggaaggaaggagggagggagggaagaaaggagggaggaaggatggaaggaaggaaggaagaaaggaagggtgggtgggttctggttttggtctcaaaacccagaaacttcagctgcataatacaggaacctaatgcaatttctcttttctttcagatcaaggaaccagaaagcttctagaggcatgagatgtcggattccaataaagcactcagaaggagctgatcttaccgttttggtttgggtagtagagcgagacatctcagtgctttcagtttctacccctttccgcatcccactaaaccactttttatattccattcgaacctggaaatttgagtggagaggtccgtgttacatccagagcttggtttgggagaaaggatcctaaaatgggaggctaaagataaagacaccaagccctactctctagttttccatataatcttggccatgcccatgttgattcattttatttaaactcaaacttctcagttgtaaaaaagatgtgtattaaatatcagacactataggactcaatagatgatgatgatgatggtgatgaaggtgactgttgatgatagtggtggtggtaatgaaagtaattaagatgatgatggtgatgatgaaggtgatggtaatggtgatgatggtgatgaaggtgataatgatgaagatgatgataaaggtaatgaaattgatgatggtgaaggtgatggtaatggtgatgatggtgagggtgatgatgaagatgatgacaatgaaggtgatgatagtgatgatgatggtgaaggtgatgatgatgaagttgatgataatggaacggacgatggtaaaagtagcggtgatgattaaaatgatcatgatgagggtgatgatggtgatgttgatgaaggtgatggtagtgaaggtgatgatgaaggtcatggtgatggtggtgatagtgatgatgaaagtaatgtgaaggtgatgatgaaggtgatggtaatggtgatgatggtgatagtgatgatggtgatggtgatgatggtgatggtgatgatgaagatgatgaaggtgatgatggtgaaggtgatgattataaaggtgatggtgatgacagtgatgatgataaaggtgataatgaaggttatggtaatggtgatgatggtgatggtgatgatagtaaagatgatgaaggtgtgataaaggtaatgaaggtggtgatggtgaaggtgattattataaagatgataatggtgataatgacaaaagtgactatggtgatgatggttagatgataatggtgggggtgttggtgattatatgatggtgaaggtcaccatttattgaacactagctatattcaagacactgtatatgcaatatatcatttaattcttacataaatggagtaagaaagacatttctcctacccacaattaaagatccgaagttgagactcttgcagttaaattgatatgcccaaggtcacacagccaggactcgaaaccttgtcatcttactcagagccctgacgctaaccattacaatcacccatcctctgtgattccaagaattgccttcctctaacctccttaacatgctaaaaatgacatttaaagatttaatgctcgacatcatttcacaaggacaattaaattatattttacttcttctgtgagtgagaagtaccaagcatgaaggcactaaaagattgaagagaaattaatgacgtgttaagatagccttttgccactagcgtcttaactgctggtagttttattcaacagcaaagggaaaatgccaggaaaatttgtcctaattttctatggagagtaaaattgaaataacactcactgagatcttaataacaacactaactgagatcttaatgtgtgctaaggactatgttaggagtttgcactgattcatttaagtcttcaaccctgtaatgaaggcatcaccacatctgcagatgagaaaactacagatgatgctcagaaaggataggcggtttacccagagtcacacagccacctactcagtggaagaactgggattagacttgaagtctctttgagtttgtggtagattgtgccacatatttcagcatcacttcttgtagtgcccctcactacagaaggattattcatccccttcttggtgaactgaggtatggccatgtgacttgctttgactaattaaatgagagcagaacagaagtgcaccactactaggtagaagctttaagagagctaagctgtgctttcccacaatctccttttcctgtgccatgaaaccatcaatgttctaaaaagggggccacaccttcagcctgcactccagaggaaagacgatgtgggttaagtcacagttatgtagcacaagcaagaaataaatatttattgttttaagttgctaagattaagtgtgggaggcaaggggctatttgttattgcagcataatccactttatcctgactgacccatgctcttcaggatatgttaggatgctaaacagatgaaacccacagcatacagcataccccagcagcacctaaaccctcatccccaaatcaagacaaacccaaaatacaattataaaaggtcagggaagagtgagaacgtgaacaaccattcaattagactttgggactaggctgatgacagacaaaataattagccttacctggcgattaaggagacagtgtaccacaaagagcaacactccctgaagggtgttgatgatggtgaatgagtatgcaatgattgatccaatcgtcttccctacttcttcaaccataaaaaaaccaaggccccaagaacagcccaggataaatagctgagaaatggctttaaatgtcatgactctgcagggaataaaagtaataataactacggtttaccaggtatccactacaagtgctaactaaatgctctgtgtgcattcccttatttaaatctcacaacagcttcatgcagttaagtgacgtatacaacaaggtcacacagcttgaggatgaagtggaacccatgacttcagtcatggcaaatcactgagaatagtgctttctccccaccgttgaaaataatttgatttctctgcatgtcttctgcctagattttttggaagatttatgggaaaatgccttctagaaatttgtattaaaacatttgaataatggtgaattcctgactttagaacataacataatgttgggtttcttcacacaaagtatattgtgtttcatataatggagtgggattgttgatggcagctggctgggagagctgatgagtgtgtgtgtgtataggtgtgtgtgtgtgtgacttcactttttactttttgtgttaccccctgggaatataaactctatgagggcagggattttggtctgttttactcactgctttatctccagtccttagaacaatgcctagcacatagtagatactcaataaatattatggtttgtgataaacttgctaattagtccttcctgttcctgatttggttcctaggttttccacaactgctatctagcttggtgatttttcttacatccagccctccttccatttgcacttacagaaagatatatacttatagaaaagacagaaaacctacctatgtccacatttaggagacagcataatcactggtatatgaggattctcccatgacaactttctctttggcctaaatggtgccatatggcttcatccccactgaccatagccagttgccccacagtagacacctgacctataaggagtcaatcaatccattttccccccagccaaccagattttgtctcttaagcatttgaagtaagaggcttggagaatggacctgtgagacgcctttgaggtggctctgccctgttcatcagctgtgggaagtcagtctgcagggagaagaggacagagccaaggtgcaggaaagggagccataaatatgcgattttttttttgagatggagtcttgctctgttgcccaggctggagagcagtggcacgatctcggctcactgcaacctctgcctcctgggttcaagcgattctcctgcctcagcctcccaagtagctaggactacaggcgtgtgccaccaccatgtctggctaatttttgtatttttagtagagacggggtttcaccatgttggccaggatggtctcgatctcttgaccttgtgatccacccacctcggcctcccaaagtgctgggattacaggcatgaaccaccgcgcccagccagatatgcgattccatatcacaatggttaattctggagcttaggagacaaagggactcaagtggatgggggcttctaacagatctggaacaagtctctcaacaactctttcccagcctccccttcctgccatgatgtctgaaatttctagaatccaagtccttcctattgaaagagcatgatgtttccaccatgtcaatgttaacctcggatttattacttaggaaatagacgagatagttaatctctaccccaaagtgtgacattaacctagtgtagcacaacagggtaactgtctattcaccagcaagaggaagaggttggcagcagggcatggctgctgggatgaggtcagacatggagcttgctgtttgcagttctaaggaagaagtgagcccttacagggtaaggaattgagaaatggggggatggggaaacaccaagaagggtggcactttgaccctcaagaattgaggaaaccaaatttaagaaatgtcagactggtctgataagtagaggagtcttgagacagggtctgaaattagacagtcctttaattttcatgcacgtgactcaccaatgcaagatccttacccactcttggggtaaggatccagcatctatcaagattctattgaatattagcttttgtcatcattatttttaatagcatagattggtacccatgagaattgagtttctacaaccaaagaacatggagtccaggtagggtgcggtgtggttcatgcctgtaatcccagcactttgggaggctgaggcgggtggatcatctgaggtcaggagttcgagaccagcctgaccaatatggcaaaagcctgtctctactaaaaatacaaaaattagccaggcatggtggcgtgtgcctgtagtcccagctactcagaaagctgagacaggagaattgcttgaacccaggagaattgcttgaactcgggagtgggaggttgcagtgagacgagatggtgccgctggactccagcctaggcaaaagagtgagactcagtctcaaaaaaaaaaagaaaagaaaagaaaaagaaaaggaaagaaaacggagtccaggggcatatgggctcttggtggagtgagaggaggatgttgatactcttggaattaatttcataataagagtgtgttatacaaaggaggcacttgataaatgtttatttttcttttcttttttttttttgagaccgagtctcgctctgttgcccaggatggagtacagtgacatgatccgtagctcactgcagcctcaacctccccagctcaggtgattctccctttgcagcctcccagatagctgggactgcaggcgcacgccactatgcccagccaattttgtaaatttgttgtagagacaggggtctcagtatgttgccaggctggtcttgagcagctggactcaaacagtcctgtcacctcagcctcctcaagtgctgggattacaagtgtgagtcactacacccagcaggaatatttattgaataaggaaatgaagttacctgaaaatcagagtttctatttcttctataaattgtccttcacatgctctttatcgcgtaccagaataatttatatcatatttctgcttgggttctttctttcccaaaagagcagccacgtaggaataatgtttgggtaccactgattctgatgccttcttacctggtgtcctgaatggtggaaacttctttattgagggaggaaagtttgcttctcaaaatccacagaacttggaagtagaacaccaggtttatctgtgggaaccgcatgaaaaaagtgacttggaattttcttttggagccattttatacaatctaatttgaggagggcctaagaatcttttcccaaaagacacaggttttataaagatggtatgcacatatgttctggtctattacgtacaacacgcagcatataccctgtagcatttggtgcttgattaggtaactatcgaatttatcattcaaaccaggagactttgaaagtggaaaggtgctattaatgtctctaccagggaacaggtgtcatcagaaagtttccggcaaacaggaaaccatgtcaccctgtgtagagaagccaaccattaaatatttgttgaatggaatgaataacagcattttgaaaagaagtcccaggagaggtgatattattacatcaaagcaacaagtgagccaggaggaatccaaggaaagaaaagtggagacagtactttcaggaagaggggctgatcacattaagctgttatttcttatcttcatctcatttccccttagataagaaaaacattttgtatgcttggtcaacctaaggcgggcacacccataaataattatcgcctaccaagataatgactgctactggccccatgaagctccagatgaatcctttatcaagcttgagccaacagctgttgagacagagagaagcattagctgcctcttccttgggagaaggcagagaacttgaatacaggctcctggggcaagatgtgaacagggccaggagttacttcggtcagaatcctgaattttagatggagtcagatgtgagttctcatttgatgcaggtgcatgctctgaggctgagttttttcaagtgtataatagagctaatcaaagtactggaaagattaaatgatgaccgtagctgtctactgaggcttgaagtcagggaatgtcagttctctggcttcattgttctccttctaaatagagttggtcattctaggtcttttgcctcctttatctaaacttcagaatccgtttgtccaatatccacaaaataattttctgggaatttgatttggagtgtgttggatctatagatcaagttgggaagaagtgccatcttgacaacgttgagtcttcttatccatgaacatagaatatctatttggatatcctttgatttttttcatcagaattttgtcactgccttcatatagaacttgtaggaaagattaaataagataatgtgcttaaagtttttgagtacagttcctagcaatgagttaacggtaataaatgtagttagcaagttgataatgattgctataatgagaaagatagtaaaaacgataactacagctataaaaactaactctaattaagcatattgcatgcaccaggtactctgttgtccagataatttgtattctttcttggcttatgatggcaaaggtagcataccttatttttaaagggaagctgagagcctgaatctctaacattcagtaggcagaaaagcttccaaacttaagttctatccgaagggctgccaactatggcccacgggtctgatccagcccgccacttgctttcataagttttactgaaagacaatcaactcattcggttacatattgtcaatgctgctttcacactacatgggcaacattgagtagtcacctcagagaccttgtggccagcaaagccaaacatatttactgtctggccttttatggaaaatgttggttccaaatctttgctattgtgaatagtgtcacaataaacatacgtgtgcatgtgtctttatagcagcacgatttataatcctttgggtatatacccagtaatgggatggctgggtcaaatggtatttctagttctagatccttgaggaatcgccacactgtcttccacaatagcaacccaaatgtccatcagtgatagactggattaagaaaaggtggcacatatacaccatggaatactatgcagccataaaaaaggatgagtcaatgtcctttgtagggacatggatgaaggtggaaatcatcattctgagcaaactatggcaaggacagaaaaccaaagaccgcatgttctcactcatacgtgggaactgaacaatgagaacacttggacacagggtggggaacatcacacaccggggcctgtcgtggggtgggggtaggggggagggatagcattaggagatatacctaatgtaaatgacgagttaacgggtgcagcacaccaacatggcacatatatacatatgtaacaaacctgcatgttgtgcaaatgtaccctagaacttaaagtataattaaaaaaaaaaaaccaccaaatttccatcttccataatagaaaaaaatcagaagggagtacctaaaattgtaaaaaaaaaaaaaaaaaaaaaaaaaaaaaaaaaaaaaaaaagaaaagaaaatgttggtcaactcctctaccgttctatctccagcattctggtaggacatagagttcaagctggaaacaaagcacctctttgactttaagaggacaaagcacctctttgactttaagagggacaacattgggaggccgaggcaggcagatcacctgaggtctggagttcaagaccagcctggccaacctggtgaaatcccgtctccactaaaaaatacaaaaattagcagggcatgatagcgggtgcctgtaatcccagctactcaggaggccaagacgggagaattgtttgaaaccgggagacggttgcagtgagctgagatcacaccaccgcactctagcctgggcaggtgagcaagactctgtcgcaaaaaaaaaaaaaaaaaagggacaacagtaactaacatacatgatgttttagtgtgtgcacaacctacttcctaacccaagcaccattaacaaaatattgacttcttcaactaactgttgtgtgttgagttttgcaagcttcattactgaagcaataaaacatggctattcagactatttccttgaaaattctgacttacttgccttgcagctctgactttggggaagtttatgaaatgcactcaggcccaggtgtcctgtgcgtaagaaaataaactgctgacgtcatagggtcatggtgagaatggcatgagctactgcatagaggaagcacgatttttgatgcaccatagggctttgatagttgtaatattggtgttattctttacagtagccattgctactaccatcataaagacacacattatgcttactgagtaaatgttccataattctggggtccaactattgctgacacagcaataatcacagctgggatcccgtagcctacagggtacatgaacctcttcttgaatctgcccgtgctggtgtagttggccaccttgaggttcctgacggtgaggaagaggtgcagcccttccaggagcatccaggtgaagcaagccaggtagaggaagtgcagcagccctgcaatgatggagcacagcacctggagggaacagaagagttaggggtgtgcagcagatgtggtctgtacctgattatatgctcagcacttagcatttcctggatgtggcctggaatttcaatttgagcatctgtaacattttgcctgggggctacacattttctgaagacttctgctagccattgaagtctgtttacatcatgcatagagcagggtagaaacccaaggaatacatgtcgtgggaacagcccccaaatgtataataaacaaaaattggtagaatctaccaatctaagacatgtgctctacactgccccctggagatcctcggtggaattgagctccaaatgtctatagtggaaacatctattggctaggtgcggtggctcatgcctgtaatccccagcattttgggaggccgaggtgggtggatcacctgaggtcaagagtttgagaccagcctggccaacatggtgaaatcttatctctactaaaattacaaaaattaggcaggtgtggtggtgcacgcctgtaatcccagctacttgggaggctgaggcaggagaatcgcttgagcctgggaggcagaggttgcagtgagctgagattgtgccattgcactccagcctgggtgaaaagagtgagacttcatctcaaaaaaaaaaaaaatttcatgtgctgatgttctaatccccagtatcacagaaggtgagtgtacttggagacagggctcttcaagaggtcattatgttaaaataagttcagatatgtgggccctaatccaatacaagttatgtacatctaaaaatagattaggccgaggagggtggatcacctgaggttgggagttcaagacctgcctgaccaacatggagaaaccccctctctactaaaaatacaaaaattagccagacgtggtggctcacgcctgtaatcccagctactctggagtctgaggcaggagaatcgctggaacccgggaggcgtaagttgcgatgagctgagattgtgccattgcactccagcctgggcaacaacagggaaactccatcttaaaaaataataataaataaataaaaatttaaaaataggagattagagtgcagacacacacaaagggatgaccaagtgagaacacagggagaagatggccatcaacaagccgaggagaggcgtctcaaaaaaagccaaccctgctgacatcttgatctcagaccatgagcctccagaattgtaagaaaattaatttccattgtttaaatcactccgtttgtggtaccttgttatggcagccagaacaaatgaatatacttttatagaagtcatgcttcatgatttctcataattctccagatgtgttcacagacacaaaattttccattcaatgtgcggaataaggcttccatttctaatcgtgataacataatgaggatgggatttaccctcccacattaaacaactaaatgctaaatgacatgtatgacattatgagttacagatattggagaataggcattgaatatttatgtttacagtgatttctaaaaggagggaaaggccggacaaggtggctcacgcttgtaatcccagcactttgggaggccaaggcatgtatcaccttaggtcaggagttcgagaccagcctggccaacatggtgaaaccccatctctactaaaaatacaaaaatcagccaagtgtggtggcatgtgcctataatcccagctactcggtaggctgaggcaggaaaatcacttgaacccgggaagtggaggttgctgttagccgagatcaagccactgcattccagcctgggtgacagaacaagactctgtctaaaaaaataaaaaaaataaaaaataaaaacaaatagaaaaagaaacctaccctatcaacacatagaccgtagacttctggcctccagacctgtgagacaataaatttatattgcttaagccgtccatatggtggctcttcattatgacagctctagaaaatggagacagagaccaagttatctagaatgtatgaggcaggctgggcgcagtggctcacatctgtaatcccagcactttcggaagccaaggcgggtggatcacctgatgtcaggagtttgagaccagcctggccaacatggtgaaaccccgtctctactaaaaatacaaaaaaaaaaaaaaaaaagaaaagtagctgggcatagaggcaggcacaataatcccacctacttgggagactaaggcaggagaatcacttgaacccgagaggtggaggttgccgtgagcggaggctgcgtcattgcactccagcctgggcaacaagaacaaaactttatctcaaaaaaaaaaaaaaaaaagaatttatgaggcaaaataccacagggtagggagctacagtggggttgggaagcggggaaggggagagattggcagagggtttgattacttatcagcaaatgcttgcaaggagactaaccaaaactaggagaaggctcctaaagaggagtaggcagaacaatcttctgagttcacacagaactggaaatagcttgttcctattgtccaaatggtttgttcctattacccaattttacctgaagttctgtgtgttaggggagtctgatatacagattccctgtatgttagagcagattttctgtaaacaggctctctgtatgttagagcagactctcctaacatccagaatttcaggtaaaattatcaggagagtattatatcattaatggggccaaatgagccctagacgaaagagaattccgtgaccactctattcaatcttagaatcaagacttgaatgtatcaaactgtttccaagtcacttaattatgtcccctcaaaagcctaaaactgtttaaataatttttttgaaaagatacagcactcataatttaaaattcaccaagaatggcattcaaacaaaaaatagcaggcatgcaacaaagcaggtaaatccaatcaggtaatatacacacatcctactatttctgtctctccagaaaccctgactaacacagcctcttaactaccaaatccagcagtctctctacttggcgtttctgtttgtttttgtgtgtttgtttgtttgtttgtttgttttgttttgttttttgttttgagacagagtcttgctctgtcactcaggctagagtgtagtggcatgatctcggctcactggaacctccacctcccaggttcaagcgattctcctgcctcagcctccagagtaactgggattacaggcacgtgccaccatgcctggctaatttttgtatttttagtagagacggagtttcaccatgttggccaggctggtctggaactcctgatccacccgccttggcctctcaaagtgctgggattacaggcatgagccactgtgcccgtccttctacttggcctttcagcagaagctgatcaacctagttggcactttctgtcctttgatgtcctggacattcatctatccaggaattctcacctgcttatctttgagtcttctcgtctatctcatgtatcttcctcctcccaatctttagattacaggcgtgagccaccacgcctggcctgaatttgcttttcctgtccctgaattaactgaagttttattcaaaattttgtgtataggtacatttgtctgggaaaaagggctttagctttcaacaaaattctcagagggatccaacttcaaagatgctgagaaccattgctctggggattttcaagagaaaatagaattcaggcttaaggaagaactggtttgaagtataattggcaattaaaatgtggactaggctggggtgacttctaagcctttgtgtccccatccagaatgtggagactgtggctcctacatcctggtggtccctacctcataggtgtttgcagagggcctggcacctgtgaagaccctccttactgagtggcctctattctgagagcatggcctcaaggactctggagagaattatggagagaccacgtgtggaactttcttcctcctgtcccaacgccccctcttcctcttcctcctcctcctccctctaccgcctccttcctcctccacagagctttattcttaatccattttacttatcactgatcgttatttctgtagcttgaagtgtctccttcgtgtagaaaactccaatatccctttctcctgcttcaatctctcctgggctcaaaattcctatttccaattttctattgtatgtctcaattccagtgtctgaccagcacctctaactaacagatttaaacccgaattcattctatgtctcgctccaagtctgttcctctttctcgccatccatctacccaacctcccaaatgggagacctctaattcatccttatttctgctttctcacacacacaccacttccacatctatttgggcctcaagtcttaccaactccccttacaaacatttctaaaatctggcccacttcctttagcagtgttcatgtttttatttttttattttgttttattttttgagatggagtctccctctgtcacccaggctggagtgcagtggcatgatctccgctcactgcaacacttgcctcccgggttcaagcaattctcctgcctcagtctcccaagtagctgggattacaggtgcccgccaccacgcctagctaattttttgtatttttagtagagacggggtttcaccatgttggccaggctggtctcgaactcctgacctagtgattcacccaccttggcctcccaaagtgctgggattacaggcgtgagccaccgtgccaggcccatatttttattaactcccacttagaccattcatagccctgttgctattctttctgctgctagtttcatctcactgcagttatctttaccttcaacttttgttgtcctgataagtattttctgtcattcccagcttgaagtcctttccactgctgccttgagcagggttaggaaatcagtggctttgggccagttctggcccagtatctgtttttataagtaaagttttattagcacatggccacacacattcatttacttttatctgtggctgcttttttttttttcttttgagacaaagtctcgctctgttgcccaggctggagtgcagtggcgcaatctcggctcattgcaagctccgcctcccaggttcaagtgatcctcctgcctcagcctcccgagtagctgggatcacaggtgcccaccaaaggtctggctaattttttgtatttttagtagaggcagggtttcaccatgttagccaggctggtctcaaactcctgacctcaggtgatccacccacctcggcctcccaaagtgctcggattaggcgtgagcaaccgcacctggcctcagcacatgtttctaagctgtgaactctatggggaaagtaactgaggtagttcccctagtcccctaattattaatgtatttgcaacacaatgcctgacacacagtgggtatttttaaaatatccatcaaatgaataaataaataaaataagaggtaggattttagagcattatataaaagcatatattttcaagatgactaagtcaactccatcttacccacaatattatttttacagtttttaaaaacatcatttgaaaattttatcagagaagtaattagtaccttccgagcacttaactatgggtgaacactgatcaaattgctttgttaagtattaactcatattattgtctcaatactctgagacaaaaaaattttaagggccaaattttaagctatgcagtcaaatctctattgcaattacaccattctgccattgtagcgtaaaagcagccacaaacaatatataaatgaatagatgaggctgtgttttaataaaactttatttacaaaaacagaaggtgggccagatttggcctgaggactgtgtcttcccaacctctgcctattttcaaatgaaacaccaagaggttaaaatctggcccccaaatctcacagcgagtaaaaaataaaattggatttgaacctaaactatctccagaaaatgtacttactcttaaccataaaactatactatttctcaggaaaaaaaatttaaatataaacagagtgcttttgtaactttctagctgtgtgatcatagtgttttagggttaacaggagacttagagaaccatctagctttaaatcttcctggataatatgatggccaggatcatgataaagataaaagtgaacattgttctctgagtgattaattcataatcttttatgttttgtcttgctaagttcttactaaatcctatgattaggcccctgttttgcagaggaagtttaaaaaggggaagccacaagagatctattgtaaaacatggtgatcatagttgcatggtaacaatgtatgtattcttaaaaacttttaaaagaatacgttagtgttctcatcacaaacacacacacacacacacaataaagctgagtatgtgaggtgatgcaaatgttaattagatcaactgagccattctatgacgtataatatttcaaaacatgctgtacagaaaaaaaatatacatatactttatatttttcagtttaaaaattaaatttaaataaattaaaaggggaagtcacttcaacaggtcttacagcaagtagggtgaagagctgcgattcaagcgcagatcagtgcagcaaacccactgcccaccaaaaatgcaagcctcttccccaccctcaaatccagagtatagatttgtcactaggaagtggcttcccagacagagaccacatttcccaactgcccttgcagttatgtgttatcatgtgaccgagtcctagccaatagagtgtgaggggaagtgatatgcaccacttcatgatgtggcacatgttaacctcccccatgggaactcagccatgttcttttccccctccgggttggctgatatgtgaacaccacgatgaccttgggagctgtgtatggaaaatgacagagcctccctcaacctgagggtgcaggatagacactcttcagacctgtttgctcaccctctactgatacataaggaaaaaataactcctactgtggcaagcctgtgacattctggagttgatcctaacaaccgctaatgttaccctatttaataccatcagcctgacactccatcactttgctaaatggcccctcagaatgtaaaggtcttattccaacttctataggaggacaactgaaatggagctcatacttttcctctctacatcatcactgctgactaatgccttgctctccatcttcttgtgggacaagatggctggattcgttatggcaatgaggtaatttgggtaaattacctacctcaggctcagttctgttgatgcccgtcaggaacaggaggtgggccaggaagaggcagagggagagctctagatggagggaggtgctggtgttctggatgggccggcacaggaggaaggtgaggatggccaggaagaggcacagcagagagatggtcagccccacctgggtgatcacggtcagcacagggtcctcctgcaaaacaccaaagggggaatccattatggtgtccgatggtgttgttattttcctgaggtagtgccagatgggcttcctagttcagtccctgaaacaattgacttacctttctgagacttagtgttctcatcttcaaaatgagggcagtagtaacactcatcacacaggaatgttaaaaaccaaaacaactagaccagtgctggatacagctcttaacaaatgactaatgggagttagtgtataaatactccagctcccttgctgctcagatagaatgacccagagatgtgagttctacactgactcccagagtcccccagagggaataaattccagttacctatggtggtaactggcttgataatgctgtctgcactgacacctgtcttacttccatctcattgtctcagtcccccactagtgtttcctgtaatcccctttcaagtaagctactaccatttgactccttgtcttagaatcttttttctttttcttttcttttttttttttacatggagtcttcctctgtcaccgaggctggagtacagtggcatgacctcgactcactgcaacctccacttcctgggttcacccaattctcctccctcagcctcctgagtagctgggattacaggtgtgcactaccatgcccagctaattttgtatttttagtagagacggggtttcatcatggtagccaggctggtcttgaactcctgacctcaagtgatccacctgcctcggccccccaaagtgctgagatgacaggcgtgagacaccgcgcccgacctttagaatctttttgtaagaaatgcagaggataactcacaaattctcggacatacacaggttcacaggaatgaatcttggtaccttgggggcaagagccacgaggacggcaaagctggacagatggaagcacttgcatttggtgtaagaaccgttgctgtgcacatgagagcagccctccgtggaccagcggcctccctctgatccctcccagtagacacagatatgttttgttctcttgtcaccaggctggaaagagaatagtatgaaagtgggtctcttcctggttttattttttattttattttattttattttgagatggagtcttgctctgtcacccaggctggagtgcagtggtgtgatctcagctcactgcaacctccgcctcccaagttcaagtgattctcctgcttcagcttcccaagtagctgggactacaggtgaacactaccatgcctggctaatttttgtatttttagtagaggtggggttttgccatgttggccaggctggtcttgaacccctggcctcaagtgatccgcctgcctcggcctcccagagtgctgggattacaggcatgagccaacatgcctggcatattatttcaactttacaggttaatcacaatgcacagtgttggaaactggatcggaaatacacttgtaggggaagagtttcacatcaccacgcctgcggtgggtttattctccatctattctgcccttctctggtcagctcagcaccctggggttgaccctctgaatggcttcgccagcttccttgctatttatagaagcaaagagaggcattggtgagactcactgggtgagagaagagagagaaataaagtatttcttccctgtgccctttctgctttgagccatctccagtttctgcagagcgatccctcattcctgcctccagcttccactgagctcaatagagcttctcctccattgccttttggcttcaacgtgagaatggcatctcactgtggcaagctctggatgcctcaacacttcctttcttcctgagctttactaaagtgtgattaacaaagaagaatttgtatttatacgttttgatagatgtatacatttttaaatgattactacaatgaagctaacacatccaacacctcacatatttttgtgtgtgtgtgtgtgtgcgtggtgaatacacttgcaatgcactctctcagcagatctcaagtgtacaatacattattaagtgtagttacattgagtgttgtacattaggctgggcatggtggctcatgcctgtaatcccagcactttgggtggctgaggcaggcagatcgcctgaggtcaggagtttgagaccagcctggtcaacatggtgaaaccttgtctctactaaaaatacaaaaattagccaggcatgatggcaggtgtctgtaatcccagctactcgggaggctgaggtgggagaatcatttgaactcaggaagcagaggttgcagtgagccgagattgcaccattgcacttcagcctgggtgacagagtgagaccctgtcccttaagaaaaaaaaaaaacaaaaactattggccaggcatggtgtcttacacctgtaatcccagcactttgggaggctggggtggacggattacctgaggtcaagagttcgtgaccagcctggccaacatggtgaaaccccgtctctactgaaaataccaaaaattagctgggtgtagtggcacactcctataatcccagctactcgggaggctgaggcaggagaattgcttcagctggggagatggaggttgcaatgagccgagatgacgccactgcaccccagcctggccgacagagcgagactctgtctcaaaaaaaaaaaaaaaatcttcattcatctgttgacagatacttaggctgtttccatatctcagctagtgtgaataatactgcaataaacacgagagtgcagttatctctttgagatcctgatttcaattcttttggccacataccccaaagtggaatcgctggaacagacgataattctgtttataactttttgagaggcctctgtactgttttccataatggctgtaccacattacattttcatcagcagatctataagggttcctcttttttttttttttttttttttgccacatactgatattttaagtttttggtaatagccatcctcactgtggtgaagcaaaatctcattgaagatgcctcagcgtgtcttgtgtgttctcttacttctgaattccgtttcctacttgggaagctgactgcacctgctcaccctttaaggtactgcatggagacccagccctgggtgtttctcacctgattatggcgaaaagtcaggaacacaggttcagagagggaaattttttccttcaaaccgacggtgccgctcacaacgtaagagttcagttttacttcctgcatcccttttcgtttactaaaaaaggatgcattcagaatatccccaagagattgataagtgatagggcaactgcagtgctctctgaagaaaaaaatggaaaagaaatactgttagtggccatccatagtttggagagaaagtacagtactctctaatgtgagggtcgtagggcaggcaatgaatggctaaaactgcccttggaaatcccttaaatgctgttcaatacaccgtgtgtcgcttggggtgcagcatttttgtctacgtaatatgtattataatgccccatacattataagcggtgcaaaatatgtgcaaaatatgtgcaaattatgctcttcagagtcctaaaaatatatatgagcccttgagcattacaaccagagttgtgaggcaagatgcttgtcctcagaagggcacatggaactcacgcaggctaagaaaaccacactctctcagccttcacctcaagctcactccggggtacctaatttagtggaaaggtatgcagaatgacccactgtatttaattaattcactcattttttctctttctcatcttattacccttcctctccctgtcttccttttccccctccccttttcatgaagccaccgtttaatgtatagaggttcaggccgggcgcggtagctcacacctataatcccagcactttgggaggctgaggcaggtgggtcatctgaggtcaggatttcgagaccagcccgcccaacatggcaaaatcccatctctactaaaaatacaaaaattagccaggcgtggtggcgggtgcttgtaatcccagttactcgggaggctgaggcaggagaatcgccggaacccaggaggcggaggttgcagtgagccgagatggtgaatggagaatccgactccaaaaaaaaagaaaaaaaatcatggaggttcagtgcacacaggacacccgtatgatgggagtgtttcccaaattgcagttatccacgtgctaccatcccatttttgaccaaagctacttatcatctgtatttctatttgctccatttaaaaaatccaacgcggttgggcgtggtggctcacgcctgtaatcccagcactttgggaggccgacgcgggcagatcatctgaggtcaagagttcgagaccactttggccaacacggtgaaaccccgtctctactataaatacaaacattagcagggcttggtggcatgtgcttataatcccagctacttgggaggctgaggcaggagaattgcttgaactcgggaggcagaggctacagtgagccgagattgtgccactgcactccagcctgggcaacagagtgagagtcagtctcaacaacaacaacaaaatcaactcatttttagatccctttcctccctttccctactctaccgctcacagtaaggagtgaagattaatgaataaccaggaattttttggaggaaatgcagcagatatttcatttttaaggtaaccaggtttttctctttgaaatagtttatatgcattcattcatttatgtttcatggaaatatttatgtatcctctactgtgtgccagacattctaggaattattatacagcagtgagcaaaacagacaaaacccctgccatcagagagctgacgatgtcgtagtgagagagatgggccaccaacaaataaataaattagaaaaaatacatagtgcaggagctttgcagagacttcaggtgatgagataaagtgtgggtgaaacactatgccgtgaaggtaaaacccagcctgccacctgcttttgtaaataaagttttatagacacacagcctcactccttcactgacacatcatcaatggctgctttcacactctgatggcagagctgagtagttatgacaaaggtcatctggaacaaaaggcctaacatatttactctctggaccttgtagagaacatttgttttccaatctgtggtaaagaacaagactcggcagctcttttaaaaagggtgtacataaacgcttctcaaggaagtgttcaaggcaatctgacaccattgagtgttaccttttcagaccattacatggaaacagagcatgcatcagccagtcccttttttttttttttttttttgagacagaatctcactcttgtcacccaagctggagtgcaatggtgcgatcttggctcattgcaacctccgccttctgggttcaagcaattctccggcttcatcctcccgaatagctgggattacagtcacgcaccaccatgcctggctaatttttgtgtttttagtagagatggggtttctccatgttggccaggctggtctcaaactcctgaccttgtgatccacccgcctcaccctcccaaagtgctgggattacaggcgtgagccactgtgcccgcccagccagtcccttttaaggaggcatttcaaggaatccttatgcaaacctttgtgtatgtcacaaaatacacaccccatgtgacagcccgacttctctctgcaaaatgcctagttagtggttacggaagatcattttattccaccatgtagaatctccctaccttaaaagctttgtgaattctcaccccagggtttaatcgcctagaaataaaacaatgatgtgtagaatttggagtcaagataattcatcggagatatggtacctcttaggtttccttttaaagcatcagcacagttgatatccatggtgttatttccagcttccagaaaagcattctcccttgtctcattgcacctcttggtttcatagactgaaaacattaagaaagtcagtcctgttctcaagtctcatacctaaataatttgctaaagaactcccttttctggaagacctcctactggtgattccatctctcctatgcaaggttggccacgtggcaccttgttcccatctttggctggtagaaatggagtggccaaaatggccttagcaacacactggccacagcccaagagaggagaagggcatgcttcccagaactggtactctgataggcaagctaagcagtttccacaggacacttaatggtaccggagtccctggttaggggagaatgcaatctttataagcaagagtagctaagcatttaaatgttttccaaaaaaaaaatagtcactaggaacagaacttctgcatttgggaagaatccctgtaaacctataaacacaagagctgatcattttgtgaggtcaacctcaacattttggggtatacagagtttgtctcagaacaaatgagaaaactgtcctaggtgctatggcagactgcttattacctgtgatcaccatttacctattctttctttgcatctagaactactaaatttaagctgaagacaagccattttccagcttcccttgcagctaggcagagccatgcaactattttcaggccaacggatcaaagaacagaatggcatgtgctaagggaaacaggcatcctttcaacttctcttctccccttttcattggctggtaaaagggtgtgatagtacaacaactctcttgtatcacaaagtgaaggtgaatgttgaagacagcagagcacagagctggcatggtattgctacatcagccctgactcacttatgctcaaactattcaagaaataatggttaagctgctgtttaccacggttataccaccagatttggtatgttaattcagacactaagttcacatggaacatttgctaaaatagaccatcagtcaagtctcaacaaattcaaaaggattgaaatcctacatagtgtgtgctcagacaactcatcaaaaagagtatatatcacaactattttttcctggtaagtaagcctggtttaacatatgtaaatcaatcaatagggttcatctcattaacagaatgaaagataaaaatcatctcaattgatgataaaatgatcatctcaattgaggtaggaaaaagcatttgacaaagttcaatatcctttcttgattaaaacccacaataaattaaatgaggccattaacacaaggaaaccttaaaaagccacaaatatttggtaattcagcaacacacttctaaataaaccatgagttaaatgatagattacacaggaaatgttttaatattttgatctaaatgataatgaaagcccagtatatgaaaacttgcaggatgcagctaaagcagtgcttagagggaaatatatagctctaatttatagctaagttttaagttttaaatgcatatattgggaaaggagaatggtttaaaattagtaatctaaataaccaagacaacaagttagaaaatgaaaagcaaggccaggcgcggcgtgatggctcacgcctgtaatcccagcactttgggaggccgaggcgggtggatcatgaggtcaggagattgagaccatcctggctaacatggtgaaaccctgtctctactaaaaatacaaaaaattagccgggcgtggtggtgggcgcctgtagtcccagctattcgggaggctgaggcaggagaatggcgtaaacccgagaggcagagcttgcagtgagccgagatcgcgccactgcactccagcctgggcgacagagcgagactccatctcaaaaaaaaaaaaaaaaaaaaagaaagaaaatgaaaagcaagttccacccaaagaaagtaaaaggaaagaaataataaagaacaaaaatcaaagagaaaggaaatggaataataatataaataatcaacaaagccaaaaattggttctttgaaatgattaacagatacagaggtcagaaagaaaccagagttcctgacatagagttcctaaaacccttagagtttcctgagcaatagaatcactaggaaaatcttttgttctgatatttggtcttggactcaagttgctgacatatagtccctaagaccgttgtaatttcctgagtgacaggagtgtgtgactcaactctgaaatcctttgtactttcttggttatagaaatatcttttattctaatgtagtgactcttagccagctcctggatagcctcaggatgggggtggttgccaaggaaaccaatggtgagattaaagggttggaactttcagtttcacccccatcccagatacaggaagaggaggggggctaaatgttgagttggtatcaatggccaataatgtacccaatcgtgcctaactaacgaaccctccatacaaatccaaaagatttgttaagctgtctaggagattctagattgctgaacatgtgtgggtccccggggtggcacctctaaagagggcttggaagctctgcacctcttctcccataccttgccctgtgcatgtcttccatctggctgttcatctgtatcatttgtttatatatatatatgtgtgtgtgtgtgtgtgtgtgtgtgtgtgtgtgtgtgtatatgtgtgtgtatatatatgtatataaatgtgtgtatataaatgtgtgtatatatatacacacacatacacacatataatatatataaatatatatttatgttttatatttttattttaatatatatattttttgagatggagtctcactctgttgctcaggcttgagtgcagtggtgcaatctcagctcattgcaacctctgcctcctgggttcaagcgattctcctgcctcagccccctggggagctgggattacagatgcgtgccaccatgtccagctaatttttgtattttttttttttagtagagatggggttttgccatgttggccaggctggtcttgaactcctgacctcaggtgatccacttgcttcggcctcccaaagtggcatgacccaccacacccagcccatttgtaatatatttttaataaatggataaatgtaagtaaagtgctttcctgagttaagcgagtcactctagcaaattactcaaacccaaggaaggggtcatgggactctaatttactgcctgtcagttggacgtacgggttacaacctagaacttgggattggcatttgaggtgaagaatacttttgtgggactaagcttgcagcctgtgggatctgacgctctctttggttgataatgtcagataatgtcataattgaattgtagaacacccagctggggtccactggagaactgtgtggtcagtgtggaaaaggagcccacaataatttggtgaccagagatgaagtattccgtgttcttgttactatgtgagagtagagtaggaaaataaccgaggttttttctatcccctagccatggtggcatagcgaatatgctcttaaatactttccatcataccaagggaagttgaaaagaagaagagagctggtttattctcttgtcccttgaatttgcatttttgaaaatggagtccttctcatgtagaatgttggtgtagagggtctgtgatcctgagagcccacagatttcatcattcagaaaccctgacaaagccaggacccagacgtctttatggtctttatggagggtcataaagactctactcagcctctcttacctatatcaaattcagaaatttgaccctttcctggagaagcaaaactcgcattccagatgctcaactccacgctttgaattagttgagtagcccttcttgcaaagtcctctctgcttccatttcttctcagattttccttccaaaaaaattaagctaattagattgactcttactgaaatgtaagaaatagggaatatgcacaagtgttggagtggggagcccagaaggcaacgatatttattaaggtgctacaaggtgcgtgtggcattgagaatctaggtgcttgatgtaggtctttgaatgccagctgaggcactttccccctacgcttgtatttctctatctctatggacatgtggcactaggcacttcttgattgtgggaggctgtcctgggcactgtaggatgttgagctgtatccctggtctccatccaccagatgccagtcacacacatcacccccaaggtatgacaaccaaaagtgtccccagacattgacagatgaccttgggacagaggacaaaattacccctggatagaactaccctaccctaaaaatcacaggaagacatgttaatgtttgggtaggaaaatggcatagttatacgtaccagctgtttcccaaatccaggcttcaccccactcacccaaatatccacgtttgactgtgtcgtcccttgactattgttctctgtgaaagaaaagatgtcattgaaagagatatgggagaaaatacaccctgcttacatcccttcttctagtcaccctcaagttgagtctttccctaataattctgcagcccatcctaattcccctctaagaagcctaaaaggtattgcacagtagaattataaaagagaattagaatgggtcttccagtttcatattgagttggtgcaaaagtaatggtcatctttgccattgaaagaaatggcaaaaaccgccattacttttgcaccaacctattgctttagtcaacactgtttattcggcacctactcaataccaggcacaacgctgaactatatggatataggctaggaaaagaaaccaaggtatccccttgtggaatctgaagtctggcaggaaagtcattaagcaagttattatcaataaataattaagcaattgcaagggacgctcttaataaatagaacatgacatgtggacaaaaagatgggaactatagacagtggggactactagagggagagggtgggaggctgatgagggctgaaaagctacatatcaggtactatgcccactacccgggtgatgggaacattcttacaccaaaccccagagacacgcaatttacccacgcaacaaacctgcacatgtaccacccccaaacctaaaataaaataaaacaggacttcccaaaatcaatcaatcaataataaataggacacaatggtgtgggagtatatagcagagggtcccaacacatcagggtgacatggaagaaatcagtgttaattgagttaatattatagaagcagttgcctacacatcacagtatataacgtgccttcatatatattatctcatttcaaggaacactgaaggttgtagaaaaggcatatacagcataatatccagtattaactgacccttcctaggtgcctaggactgttaaatatttcacatacattaataatgagtaggggccgggtgcagtggctcacgcctgtaatcctagtactttgggaggccgaggcgggcggatcatttgaggtcagcagttcaaggccagtgtgggcaacatggtgaaaccctgtctctaccaaaaatgcaaaaattagccaggtgtggtggcacatgcctgtggtcccagctactcaaggctgaggtgggaggatcgcttgagcctgggaggcagaggttgcagtcagccaagatcacactactgcactccagcccgggtaacagagtgagaccgcatctcaaaaataataataatgaataggtaaggtgtattaatttgctagggtttccataatatagtgacacaaattgggtggcttaaagcaatagaaatatattgtctcatagttctggagggcagaagtccaaatcaagatgccagcaagaccatgctccctctgaaggctccagggaaacaccttgccctgcctcttccagcctctggtggttgccatcaatctctgacattccttgccctttggcagcataattccaatcttcacctctgtcttcacatggccatcttccctgtgtgtgtgtctctgtgtccaaatatccttcatcttataaggacaccagtcatgtaggattcagggtccactctgatctaatatgaccacatcttgacttattacatctacaaataccctatttccagataagatcacattcacagattccaggtggaatcagtttggggagaacactattcagcccagtaagaaggaatcagaaatggctccaaataatccctgcctcttggaattcacatccttgggtaatcttcccttgactgtggactggactaagtgactcatttctaaggaacagaatatggcaaacatgataggatgtcacttctgagagtgggttataaaagactatgactcctgtcttattcatgctctctttctggctattctaatgtgtttgctataacaaagcaagctgtagagacccacatatctaggaactaaaggctgcctcccaccagccaccagaaatgaactgagggtttcagtccaatagctctgaaggaactaaattctcccagcaaccttgtgagtagcttggaagcagaacctgccccagtcgagtctccagatgaaaccacagcctggataaaacctcaattgcaactgtgatagacccagaagcaaaagactcagctaagccatgcttagttccttaacccaaagaaactatgaaacaatacatatgtgttgttttaggccactaaatttggggataacttgttatgcagcaacacagaactgacacagtagatactattaatattactactcccatttaaagatgaggtatatagaaattaagtcattaactgaaaaccagatggtaagtggaagatttagcacttaaatcccatctctcttacccaaaaagtgaaataatactggaattaaacaaataaataaattgtggatagtgagagacaggtttctcattgttggagaaggaagctacaaataaggaaagagggaagtttccgacaagccttgatgttgaactggaaccagaggtatcagtgtgaattcgtcagatttagtagataggtagatagacataaaaattgaatttaaggtgagtgagagatgaataaatagagaaattcagaagaaatttagagctgcccttttggaagctcaggaaacagacctgtattggacacatacatttggaagcatctatatagagatagttattgatgccaaggcttggatgacaccatcttggaaaatatcatcaaagacaacaaaggaatgagggacgagggttaggatggagctttgcactcttaccctggcctgaaattagagaatctctcagagtctcccccaagtccccaccatttttcatagtggaaataggatttggaggttcttaccgtaacaatccggatgatcataatctataataccagccagaaagttgaataaagtatattttaccaaacagctacagatgtaacctccaactttattcctacaatatgctttatacttgcactttgccagcccggtttcacattcattaatatctgtgaatcaagagaaagtgttgctttcattttcatagaattataccatttcccttgcccatgaaatttttattgcccaaccattgtccatcaatgttctccctaagttaatttataaatccaatgcaattccaattttaaaaacatctacatgtattttacggggtgagagacaagttgttactatcatgcaggtgtagccagaaaaaactacaaggtgggaaccagacattaaaacaaagtataaagctgcaactaaacaaagaggtactgatgcatgcataaataaaaatagactaatggaatagactagaagtccagacacagatgcaagtacctatggagctttagaacatggtaaaggtggcatgtcaaatcactagaataaggatggaatgttgctgtttttaatgttgtttttaagtcacgccatttgctaaatcaatttaacacacatagtgcatagcaggggaataaatatacggtaagttaacacactattagaaaagcttgagagagatgaggaaggaccacactactaaaatcctggctcagccgggcacggtggctcacgcctgtaatcccagcattttgggaggctgaggcgggtggatcacctgaggtcaggagttcgagaccagcctggccaacatggtgaaaccctgtctctactaaaaatacaaaactttgctgggtgtggtggcacgtgcctgtaatcccagctactcaggaggctgaagcaggagaatcgcttgaacccaggaggcggaggttgcagtgagctgagatcgcgccattgcactccagcctgggcaacagagtgaggctctgactaaaaaaaaaaaaaaaaaaaaaaaaaggcggggcacggtggctcacacctgtaatcccagcattttgggaggccgaggcgggcggatctcgagtccaggagattgagaccatcctggcgaacatggtgaaaccccgtctctactaaaaacacaaaaaattagcaaggcatggtggcaggcgcctgtagtcccagctactcaggaggctgagatagcaaaatggcgtgaactcaggaggcggagcttgcagtgagcagagatcgcgccactgcactccagcctgggcaacagtgacttatgcaatgtttatgtgtcttgcctctcccaaccacatcagccttccgtgctgaatggaccagagctgaggttcaagcaagggacccacaggcagaaggtgctctggaccacagacttatacttgtgctctccatctgaaggactcagggacaagcacacctggccaatggctgtactttgtcaaatagtctgctgaagaggtacgggttttatttgggctatgggtttatgtgttttgggcagaggacacatggaacagaatagttatcactaatgagagattaaattaaaaccccgttaatatttttaccttcacacttctcagaggaatcatgaaagtatgtcctgccagacctggcccgaaagccatcttcacaagtacagtgggtgctgttgtggcagctggcatatttagggcatggaggacaggaagctgcagagaaacagaaatattcagtatgcatctaccacgtaccgatgctgcggtcagaagaatgtcatcttaggaatgcctctgttggcatccttttggcacccagcccattgctgaacacagtggcacacagtgcccagccgtgtcccacttctgccaccaacaccacttttgccagataggtgaacctccaaatgccggcacctgtgtttctttccttgcaggctaaccctggctaccagaattctctttgttcatcacatggcaggttaacaatgcctttcctaagtagctccctttatcaatgattgatagaagatagtgcattaaaaaaaagccaatttcattattatttaaaaaaaaaaaacagaaaataacaagtgttggtgagaatgtagagaaaatggaaccctggtgcactgctggtagaaatgtaaaatgatgcactgtctatgagacacagtatggcaattcctcaaaaaattctaaatcagaattaccatatgatcttaccatatgatccagcaatcacacttctgggaatatatgcaaaggaatcaaaagcagtgtatagaagagatatttgtccactcatgttcatatcagcattattcataatagccaaatgttgtatgtaacccaggtgcccacgaatgaataaatgaatgaacaaaatgtggtccatccacacagtagtacgttattcagcctttagaaagaaggaaattctggccgggcatgttggctcacatgcctgtaatcccagcactctgggaggccaaggtgggtggatcacctgaggtcaggagttcgagaccagcctgaccaacatggtgaaacctcgtctctactaaatgcaaaataaataaataaataaattagcctggcatggtggtgcatgcctataatcccagctacttggaaggctgaggcaggagaaacgcttgaacccgggaggtggaggttgcagtgagccaagattgcaccattgcactccagcctgggcaacaagagtgaaactcagtctcaaaaaaaaaaaaaaaggaatgaaattctttttttttttttttttttttttttttgagacggagtctcgctctgtcgcccaggccggactgtggactgcagtggcgcaatctcggctcactgcaagctccgcttcctgggttcacgccattctcctgcctcagcctcccgagtagctgggactacaggcgcccgccaccgcgcccggctaattttttgtatttttagtagagacagggtttcaccttgttagccaggatggtctcgatctcctgacctcatgatccacccgcctcggcctcccaaagtgctgggattacaggcgtgagccaccgcgcccggccaaaaggaatgaaattctgacacatgctacaccataaacgaaccttgaggacattatgctccatgaaataagccaggacaaagcgtcaaataatgtatgattccactcctatgagatccaatcccagagttgctggattcatagagacagaaagtagaatggcgggtgccagggccttggggaggaggaatggggagttcgtgtttcatagagacagagtttcagttctgcaactagaaagaacactgtgggtggatggtggtgatggttgcataacagtgcaaatgttgaatggcattgacctgtacccttgacaatggttaaaaagctacattttacgttgtgtacattttaccacaatttagaacatagtcataatcaatagcttccttacccattgaggggtacaaatctgaggtgcctgctccatgccatacccaacagctgcctccagggattaaactccagctgcccgcatctaacttgcttgataaagatcctatatgagctcctccccttcctatgccactgcccactcccagctggtgcctcctaggattccctcccagaacaacgagttgctctcagggtcggcttctgggggaacccaagcaatgacttgtggtgaaggcaaagtatttcctggaatgactcaagacacaggtttggggaaagaaagaggacagtctagcatccaccagccatgtgaccttgagccagccacttctctggaggacccttgatcaagtgggtataatgcccatgctgagtttgtaggattgttgtggggattaactgagatggcacgtgtgatgtgctttgctatgtaaatgcagatgatggtgatgatggagatgggaaaacagctcttgggacctccaaagagtcagaagaaagtgccagagactccatgctctgtctcttgaaaaagctccttccctcctccaaaggaagcttccagatcccaatttcctttcccctggcctttggctatgaatagactcacctccagaattcttggcttctgatcctggcagagccagtaagacagtgagacctggaacagagagaggaggggatcattcagacggggatcccctggactctgcgtggctgaagactaggtgagttaggggcaactaaccctaactctttgcccagtcacacgtgcaagcttcaccatagcatcttccaggcaggttacaaacacaagagtcacagatttggacatcacatccttctgaagtatgagaagtgcatctgattgcagctgtgtttcccaatttcagaaaactcagcagcaaattcagcttcttctctacatcctagcaccaaaagaccaagttggcaatctcctttccatattcaacagtttattttaatatcagtccagacctcgaaccacacactgtccgagaaaaatataatggaaaccccataggtccttttaaattttccattaccgacaattttttgtcttttgagacagagttttgctctgtcgcccaggctgcagtgcagtggcacgatctcagctcactgtaacctccgcctcctgggttcaagcaattctcccacctcagcctcccaagtagctgggattacaggcacccaccaccatgaccggctaatttttgtatttttagtagagatggggtttcaccatgttggccaggctggtctccaactcccgaccttgtgatccgcccacctcggcctcccaaagtgctgggattacagctgtgagccaccacgcctggctgacatggacatttttatgacctaaaacactcaacaccaattttcctgtgaataattttttttcagagagaaatatcacttgattcccatagggtaggggacagcaaactggacttatgagttgaggtgacttttatattttttacataaaacattttaaatggttggaaaaaaacaaaagaagaagaatacttaatggccatgaaaaccatgtgaattttagctgcctatgtctgtaaataaagttttactgacacgcagccacatccattcatttacatgaggtctatggatgctttagggctggaatagctgagttgagtagttaagacagagaccatacgggccacaaagctgaaattcaaattacctgtccctttacagaaaaaaatatgcttgccccttacatagagtatggaacatcacttacctgtaaggtctcttaacaaaccttccatccttaaactgcatctgatgcctcctatggagatttctttttctcatctctaagaccctaaagcccagaggacagggtgggaaggtctaggttgtaacttactgagctatgacgctccaagtgcggacccatttggtgtcaatccatgtagcagatactcgaagtgaccctttagcctaccccagagagggttcctataaatgcagatgactttctttttcgttctttctttctttctttctttttttttttttttttgagacagagtctcactctgtcatccagggctggagtgcagtggcggaatcttggctcactgcaacctctgccttccaggttcaagtgattctcctgcctcagcctccagagtagctaggattatgggcgtctgccaccacgcccggctaactttttttttatttttagtagagacgaggtttcaccatgttggccaggctggtttcaaactcctgaccttaagtgatccacccgtcttggcctcctaaagtgctcttcactctttcttgcgtggcctccccacaccctcctttcctgggatcccctcccaaaaaaactatttacacacatgagtccttgttttcgttctgctttggggcagcccagcctaactgactcaagaggagagtttctactaggacaggcacacgcagttattgctggagaaaatgccaaatttgaggaagcaaatcaagcgaggacaccaggggcatgaggagaaggaaagggagttctttgctccacttacctgagagcaggaccaggaggaacctgctccccatagcactgagacgccgggaacaatctctctgaagcaggacgtggtcagaatgcctggaacaaataaacctcatgaaatccaatttctgatggtcccaagttcagaagccccgtggccagtgcttatcaaaatgtaaggctgaggcaggagaattgcttgaaaccaggaggcagaggtagcagtgagccgagatcgcatcaccgcactccagcccgggcgacagagcaagactccatctcgaaaccaacaaaccaacaaaccaaccaacaaacaaaaaaaaccctttaatctctccctctcgtttgacccaataattctgcctctgggtaactctctcaaggaaaacaccctgcgaggatgatcttagcgtatttggttatagggaacaagtttatcacccaacaaatgctaaaaaaaacggatgcatctgaggaaatataaggctggaatttaaaatcctgttctatcgcagtcggcaagatcaagactgcaaaactccacaggacaaactactcactttttatttatttattattattttttttttacattgctgtcattgatttgtttatatttaatttttaaattcataaataattatatatgcttatgggctataatatgttttgacattgtggaatgattttttttttttttttgagattgagtctggctctgtcgcccaggctggagggcagtggcgcgatctcggctcactgcaagctccgcctcccgggttcacaccattctcctgcctcagcctcccgagtagctgggactacaggcgcccgccaccacgcccggctaattttttgtatttttagtagagacagggtttcaccatgttagccaggatggtctcgatctcctgaccttgtgatccacccgcctcggcctcccaaagtgctgggattacaggcgtgagccaccgcccccggctgacattgtggaatgattatatcaagacaattaacgtatgtatcacctcacatacctatcatttttcggtatgagaacttttaaaatctactctttcagccattttgaaatacacaatataggccgggaacagtggctcacacctttaatcccagcactttgggagaacgaggtgggcggatcacctgaggtcaggagttaaagaccagcctggtcaacatggtgaaaataatataatatataatatattattaatatataatatattattaatatataataaaattaatatattaatataatatgttaatgtaatacatcaatatattaatatactaaatcaatataatacattgatatattaatataatacattaatatattgatatattaatataatacattaatatattgatatattaatataatacattaatacattgatatattaatataatacattaatacattaatatattaatataatacattaatacattaatatattaataaatattaaatatatatttaatatatatttatataaaaggttactatctgttttaggaaaatgttagcattctatatacaattatccatatatgcatgtatgtgtatttatatgtgtatatacaaaatcatacatacaaatgtacaaacatataaatgcatcaaatgcatgtatatatgtatgataattttgtatttgcataaaatattcctggaaggtacctaagaaactcatagcatcggttgcttttgaaaacaaatgtatgcgaggcttaatacctaggtgatggattgataggtgcagcaaaccaccatggcacatgtttacctatgtaacaaactcgcacgtcctgcacatatatcttggaacttaaaataaagtaaaatttatttatttatttatttatttattttgagacggagtctcactctgtcgcccagactggagtgcaatggccctatctcggctcactgcaacctccgcctcccgggttcaagcggttctcctacctcagcctccccagcagctgggataacaggcacctgccaccacgcctggctaattttttgtgtttttagtagagacagggtttcgccatgttggccaggctggccctcctcagcctcccaatcccaaaatgctgggattacaggcgtgagccactgcgctcagccgaaaataaaacaagatattttaaaaagagagaaagaaagcaagtggctgggaagccgaggcaaggagacttttcagtttaccctcttctatcttttgaatcttgagccaagtgaagatcttttctgttcaaaacataaatcatttctaacagagaaaatagtggaagtactagacattactataaatgagcctttcttaccgtgtcgcccaggctggagtgcaatagcgttatctcttctcactgcaaactccgcctcctgggttcaagcaattctcctgtctcagcctctcgagtagctgggattacaggctcccgccactacgcctggctaatttttgtattttttaagtagagacagggtttcaccgtgttggtcaggctggtcttgaactcctgacctcaggtgatccacccacctgggcctccgaaagtgctgggattataggcgtgagccaccaagccaggcctaaatgagtctttcaaagaagactttaaggatcattttagtaagcgttggcctatggatatcaatttaaaatgcagaaagcactctcctaaggtaatgtcggtggccaattggggtttaagataaaacctccagtgcacattagcaaagatattgtgctctgcagatctgtgaagcctttcaaaggcgctgccaatgatgagggaggcactgatggagaagatgctttaagtagtttgcagaaaagtttcacaaaatgtaagcaggaaggaaaacaacaattacgtgtaatgcaaacaatctgatatcacatgcaaaaataatgttgtaggaggctattagaacaacatagggccgggcacggtgggtcacacctataatcccagcactttggagggcagaggcgggcagatcacttgaggtcaggagtttgagaccagcctgaccaacatggtgaaacaccgtctctattaaaaacacaaaattatccgggcaatgtggtgagtgcctgtaatcccagctacttgggaggctgagacatgagaatcacttgaacctaagaggtggaggctgcagtgagctgagatcaaaccactgcattccagcctgggtgacagagcgagactctgtctcaaaataaataaataaataaacaaccatagaaagtgattatgacgtagcattaggagcaaaaggaggttatattattctgtcattacacattgtatgcatgtatcaaaatatatcatatgtaactcataaatatgtgccactattatgtatcaatacaaaatgtaggttataaagaaagtatattacatgtaagagaatcttaaatgttaatagaagaatgtcagtatgagtgattttaaatttctcttttttcagctgtaattctaaattatgtacattgccttagcaataaaaataatataatgaagcgttttaataaaagaggaaacaaaataataataataataataattattattattattattattatttgagccagggtctcactgtgtcacccaggctggagtacagtggtgcaatcttggctcaccgcaacctccacctcccaggttcaagcaattctcctgcctcagcctcccaagcagctgggattacaggcacttaccatcaaacccagctaatttttgtatttttagtagagaacgggtttcaccatgttggccaggcaggtctcgaactcctgacctcaagtgatccacccacctcattatcccaaagtgttgggattacaggcgtgagccaccgcacccggccacaaaattactttaaaaactcttcttgggaggtctatactcctgctttgatatattcatgctgctttgatctctgagtttggaatctgttggggctgcctgtgtgtttatgtgacagttctccctccatgcttcacgcacagttacttgctggccatacactgtcagatggctttagaatttggtgcacaggcaaacctgggtttgaatcccaaatctacaactactagttaagtggccctgaggttgtgactttacctccaagcctctcgtctgcaaaacgtagctaagaaagagcacatattttacagtttcatgctgattcagtgagatgacccttcagacctgccggcacatggtaagtcctgaataaagctacctgtgaagagaagtgggaaggatgatgatggtggtagtggtggtggtggtcgtggtggatgtgatagtagtggtcatgatggtgatggtagtgatgggagtggagatcataatgatggtggaggtagtgatgaaggtggcagtggtggtgatggtactgacagtggttatgatggtggacatgatagtaatggtgatagtgatggtggcaaaagtggtggtgatggtgatggtggtgacagtgatggtggtgatggtgatggtggtgacagtgatggtggcaagggtgatggtagtaatcagggtgatggtggtgatggtgtcaatggtgatggtggtggtaataatggtgatggtagtgataggaatggtggcaatggtgatggtggtactaatggtgatggtggtaatggtgatagtggtgatggtgatgatgatggtcttggtggtggtgatgccagtggtagtaacggtgatggtggtgacgatgacgatagtgatggtggtgctgatagtgacggtgatgacagtggtggtgatggcagtgatggtaatagcgaagagggactgcatggttgtggtgatggtggcaaggatggtggaagtgacagtaatgctgatgctgatgatggtgatgaaagcggtcatggagatctctcatgtcccttccctggtgccaattgtaatcacaactttgcatgctaaggactgaccttttacccagtggtaatgagaattaacgagggtcctgtgaagtccccacaggaacacagtagtggcctaagaagacccatcccatggaaccccctattcccaagcaggcagctgcacatcatgcactggaatcctcttgcaagtcaaattttgctgcagatgcttctctcaccccttccattactgcctcctaaaatcacttacggaacttctactatgggccaagtgccttaagaactctgtggctattatcttattgaaagctacaaccatcttgtgatgtaggtttcttttgaaacggagtctctctctgtcacccagtggtgcgagctcagctcactgcaacctctgcctcccgggctcaagcaattctcctgcctcagcctcccgagtagctgggactacaggtgtgtaccaccacgcccggctaatttttgtatttttagtagagacggggtttcaccacgttggccaggctggtctggaactcctaacctcaggtgatccccccaccttggtctcccaaagtgctgggattacacgtgtgaggcaccgctcccggccatgatgtaggtcttataattatctcctaagtcttcagatgaggaaattgaggttcaaaacaatgatatcatttgcttaagattgtgctgctaggaaaatacaaagctaagatttggacaatgtcagcttgagtccaaagcccatgcacaaccacctcaccaagatcataaactccagtgtctaccaagatctagacatgcgacataaatacataaggccattggtgggacgtaataaggactgtggggaactggagaccaaaggctatctagagacacccacacccactttttccttaaatacagaaccaggagaccaaccactttcaatctctgcagtagacaatactacttcactgaaatcaatttctgttgcgggaatcttgtgtcccattggtggagttatacttgattactttctggatacctttcctctttcaaaatttgtcttctttttagagtcatgttgctccacccttcaaaaagtccactctaaaatataactggaaaattctcaatgaaaagaacccctgtccaggtaagggcatttctttgctgaggcctgatttgaaacaagtttaactaaagtgagtattttgaaaggaaaaaggtggtaagatttttcacaacagccgaggcctctagagatgctgatttgtaggggactttcggccataaccaattgtgagaaaagaatttcacatcagagagaaagagaggcagacacagagaactgagccaaggatcacacacaaagaaactcactgtttgcagcgactgatattttataattatagttgttttcatttctgcttgttgccttgttggttgttacccactaaggtggtgccatggtggtcgttacccactaaagaggaccagcctcctcctgtggatcataaccagccggttgaaaaagttgacatgtaaatccctctgctttggtcatgaataaaggacaaaacccttccaccatgataatgatgatgactgtgaggctggcatttaaacacatgtgctgatgtgtacattatgggtgtcaggtgtatggaaaagctgttaattcaccctacagacttaggaaactcgctcatctttttagatcttgttttccttgtttttcataacacgttcgttataagctatgttcatcttagactcttcttgaatcttgatcattctagttcaccttaagcccctttccacaccattgcccccttctttgtgcgtgataaggcatcccagcaggtttcagagtatcacataacaacacacacactccttgcccaagcagaagtggaaaaatgaatgtgagatagaagccgacatagcagctttcaagaaataaagtaaccggacatgtaatgaggcctccttgaaaatgtttccagaaccagaatatttttcttagattcatgatcacaagtaaaatatttcctattttctataggaagatactacttaccctaaagatgaaaagtccttgcctctcactgagtctggtagcttttcagaactgacagaagaggaagtacgtcgctctttatcttgagctccggtttctcaaggagtcttgtgggtggacacggaggctgcgttgttgtttggggagtttgcataatgcagggtctattagttctctttccactgccgtaatttaagtggtacattatcatggtggaccatatcaaagtgcctcagaaaatgaatggggaaatggtgatggtgatcagtgggaaatggagagggataatggagagtgaagccaacttccaaggatatgggttcaacttcaaagaggtctttttaatttaattttcactaccagagttgaaggccagagtgtgggaaggagtcagcatatctttgtattgcttcatttcctattccagttgaccaacttgggaaaatgactcatccatattcttggtttttgggatggtaccattgaagagaattacactgatagacttggctgataagattttcaacggtttcattagggtggtattctgaaattgttgtctcatttgtattagaagaatcttcgtggccgggcgcggtgactcacgcctgtaatcccagccctttgggaggccgaggcgggcagatcacgaggtcaggagatcgagaccatcctggctaacgcggtgaaaccccatctctactaaaaatacaaaaaattagccgggcatggtggcgggcgcctgtagtcccagctactcaggaggctgaggcaggagaatggcgtgaacccgggaggcggcggagcttgcagtgagcggagattgcgccactgcactctaggctgggcgacagagcgagattctatctcaaaaaaaaaaaaaaaaaaaaagaagaagaatcttcgtaagatccagcatgaatatggcaaatatgccctaatttggcaagtccaaatacacatcaagcaatttacttcttgtcttgattttattacatatatgaaacgtggtcttattatccctaacgttaacaccttcatctttctgttttccatttatttttataaattcatgagtaaatgcaataaattatgcaaataataacatagatatggctggatagctgggctggtaatcacctcctccatgtaccactcaaaatgtttgctgcatcatcttttttttttttgggatggagtttcttttgctcttgtcacccaggctggagtgcaatggcacaatcttggctcactgcaacctctgcctcccgggttcaagcgattctcctgccttagcctccccagtagctgggattacaggcacacaccgccacgcccagctaatttttgtgtttttagtagagacgggatttcctccatgttggccaggctggtctcgaactcctaaccttaggtgatccgcctgcatcggcctcccaaagtgttgggattacagacgtgagccaccgcgcccagcctgctgcatcatcttttaaatgacaaatgaaagacggattaagcctgccattgtcagctgtactgaagacaaaattgtctgcatgtaaaactgaaatgcctaaacccaaaggaagtccctgaaattctgagcattctgtgtgctcatagtccaattctgcacgcgatagattgcaccatgggatggaagaattctctatctttaagtgtagtctctggctctaatcttggccatgtgactggctttggccaatgaaacaacagctaacaggatgcaaaaaaaaaatgctagcctgctggagtgtaagaggccatgttgaagaaaccaaggcttgatagacaataattcatcactttggttgccaatctgccgatcaccacatgtgtgggtaaggccgtgtcagatcatctattcaaccagcatacccaccaactgataaacacgtatgaatggaacaaacaagccagctcagatctgaagaatgaccacagaatcatgaattaaatgaaatagttgttattttaagaaaaaaaaaattcaatggggagaggatggtttgttatacacccaaggccaactgagacacttcccaaggtgtcctggaataggttatttgcactcttgttgtcagacatggtattatttaactctacctcccaaccacagctgattggaacatggattggtccatatggcaaacaacaacttatgagatggccaagaagataagtgtaccttcaaacagttctgtatattgaatattgactgaccaatccattcagactgtgtctctcttgagggatctgaataagtcccagaaagggatacagacagcagcgtgactcatgagctgcaatgaacaaattaagaaacaacaaaagcagaagccgttggataggagaatctgttgatgaccttcctctccaatctctacgttgggtatctcaccttgcctcggtagagcagtacagtacactgtcaccgtcagagaaaccagcccatttcaaaacccaaggagcaaatgttcggtctaggaacgtttgatatggcctggtcatttcccaaactttaacaagcatttaacaattcactttgggcaattgtgagaaacacctgttctccatccttctgcaaccggccctgtgcattaagaggtttccctgtatgttctggatcatgaggcacttgtgtactctgctgtgaagctggatttgaccagggttagccccggaagaagaaaagacagctgatgcagctagagatggggtgtttacttctctagcttcctcttccctgccagcattgcacatttggacagaggttgggtttttctgctgtaggctaaagccctttccaggttcttataaatgctccctgccttcatgccttcaagccaacgagtggttggcttcccacattgctaatcccagggtgccattagcaatggcacccacaatcccattggattacccacattgctaatcccagggtgcctcaccatcctctgttgatttcccttagccctaccctcacctaaataaacagtcctttcattaaaccctcctcatttaactcatttgagtgggcagctgtttctccccatgtcaccaattaatacacactttggtcctgattctgcttattctagctttcttatcaactgtcatagaagaggaaacccttatttcaagaaaagaagaaaacaccattctttgaccaacatgtggaactgaaccacaaaacacaaatatcacttcctcctttgccaatcatttaagaggaattgtttctcagcaaacttcccatgccttgaaatagtggtgttcagtatgtgaattggctggaaatatggcgtaggtggtccacttggaaagaatgggatataggaatcagagcttagaacctgggctctgtcagaatggcagcccagacttgatgcctaaaaggtcatgttcagtggctcgtacgtatgatctttcttgccagttcactggacaccaatggaattatgcccttagataatattgtcacctttgtttctaacaaacctcttatgctaagtgtgcttggtgcctgagatggtattaaaacatgtccccacactttctgacattcttttctggagagctgaagtctatgtcttatctccttgtatctgggctttgtaacttcttaactaatagaactgacaatagaaaataactctatgcatcttacaggaccagatcttatcttaagacagtagtagcttctttttttttttttttttttttttttttgagacggagtcttgctctgtcgcccaggctggagtgcagtggcatgatcttggctcactgcaacctccccctctcgggttcaagcgattctccgcttcagccttccaagcagctgggactacaggcgcttgccaccacccccggctaatttttgtatttttagtagagatggggtttcaccatgttggccaggctgtctcaaactcctgacctcatgatccacccgcctcagcctcccaaagtgctgggattacaggagtgagccaccgcatccagcccatgacgttatttataaaaccaagagtgcacatgtaccctagaacttaaagtataaaaaaaaaaccaagagtgatataaaaaaaaaaaccaagagtgtctcttcaggagacagaatgtcagaataacattctgttgctgtgcagtagattgacacacggtctttcccagatgtattcattcaacaaacattataaacccaatcagtgaccccaatctcctgctaggtaatacactttcagagataaatcagacaaggaacttgtctgattatgatctaacatgatgagtattacacataaaagatcaataataactttggacacaatgaaacaaaaacgttaagtcaggaggtaaccagatgactttgaactgatgatggaaagcttttctatgagcaaaaattaaataaacttcaaattagctgggcacgggggctcatgcttgtagtcccagcactttgggacgctgaggcaggtaagatcacttgaggtcaggagtttgagaccagcctggccaacgtggtgaaaccccatctactaaaaatacaaaaattagccatgcatggtggtgggcacctgtaatcccagctactcaggaggctgaggtgggagaatggcttgaacccacaagacagaggctgcagtgagctgagatcatgccactgccctccagcctgggcgacagaacgcgacttgttctcaaaaaggaaaaaagaaaccctgtccctgttaataactcaaaaaatagctgggcatggtggcaggtgcctgtaattccagctacttgggaggttgaggcaggagaattgcttgaacctgggaggcgaggttgcagtgagctgagattgcgccactgcactccagcctgggcgacagagtgaaactgtgtctcaataaaataaaataaaataaacttgaaattactaattactatatttattttagagatagagacggggtcttgctctgttgcccaggctagagtgaagtggcatgatcaagactcactgtagccttgacatcctgggctcaagcaatcctcccacctcagcctcccaagtagctgagatcacaggtgtccaccaccatacctggctactttttggtggaggggagtagagacagagtcttgctatgttccctgggctggttgtgaactcctgggctcaagcaatcttccctctttggactcccaaagtgctgggattataggtatcagccactgtgcctggtcaaattactacatttctaatgatgtatttttacaatttgggaaagtttgggcaacttctgtgtagtcataaatgtttttctttttcttttcttttctttttttttaaattgagacagagtctcgctctgttgccaggctggagtgcagtggcatgatctcagctcactgcaacctctgcctcctgggttcaagtgattctcctgcctcagcctcctgagtagctgggactacaggcgcacaccaccactcccagctaatttttgtatttttggtagagacagggtttcaccacgttggccaggatggtctctacttcttgactttgtgctcctcctgcctcggcctcccaaagttgctgggattacaggcgtgagccaacgcgcccggctcataaatgtttttcttcaatcagacaataaaagagacatataaatttcctcccactgataacaccctactgattttaaaagcactcaaatagtagagtgttaagattatagcttgaaaatgtttttaaggctgaaataacatcgttaatggaccaggcacggtggctcacacctgtattcccagcactttgggagaccaaggtgggcggatcacctgaggtcaggagttcaagaccagcctggtcaacatggtgaaaccctgtctttactaaaaatacaaaaattagttgggcatggtggcgcatacctgtagtcccaggtacttgggaggctgaggcaggagaattgcttgaacctgggaggcggagattgcagtgagccgagatcttgccactgcactccagcctgggtgtcagagtgagactccatctcaaaaaaaaaaaaaaaaaatatatatatatatacatatatatatagaaatacagaaatatatttaaatataaatatatattacatttagttaatggttcattttcttcccagaagttgattttaaaaatattgatgaatttgcttccattaaaaccaggaaagagctgggcatggtggtgtgcacctgtattctcagctactcaggaggctgaggtgggagaatggtttgagcccaggaggtcaaggctgcagtaagcccagatcgcacaactgcactctagcctgggagacagagcaaaaacgtgactccaaaaataataaaaaataaatcttacaaaaatttaaaaacaaacaggaaattagagttttaataattttggtttggggatacataaaacatttatacaatgctttaaattctaatacactttccaatttttcagtattttttcaactaatgctctgggaggataagcgtgttgtacgtggtcaataaatatttgagtaaatggatctgtattttcttgcataccataaattattcggattataagagggtaaatttatttcatgttatatgtgtgggattacagagccacgcagtttttactgcgtctcctttctccccctagtggagacaaatgataccacagggataacagaacggcaagtgcagtttgatgatagtaagaaaaatccctgttgtggaggtcacagctttacctacttaccttaaacacaggagttttctggccaggcgcggtggctcacgcctgtaatcccaacactttaggagaccgaggcgggtggatcacctgaggtcgagagtttgaggccagcctgaccaaaatggagaatctccgtctctactaaaaatacagaattagccaggcatggtggcgcatgcccgtaatcccagctacctgggaggctgaagcaggagaatcgcttgaacccgggaggcaaaggttgcagtgagccaagatcgtgccactgcactctagcctgaatgacagaaccagactctgtcaaaaaaaaaaaaaaggaaacagagttggctaaggcgactatatcttatttatttatttattgacctttttccagtacaagtttaatattcattagaggagtttttttcatgtgatgggggagaatggcggcaagtagtaggatctgctgaaggcaggagcttcactgtgatgatggcgccccacacctcgggtttcctgcagcccaggatctgatagccggccatggtatcatcacatattttttcaacaacgatgggacatggtctgcctcatctcccggggacaccaggagcgctttccagactccgggtgatcggggagcagctcccagtatggccttagttagcgtctcctcctggcccatgttaatccataggcgccccatgatgagggctagtgagggcctctccctggagtcaacggccagaattgtgtttatgaggcattctcgttctatggaaacaaggaatgggatcgcctgtcaccattcacacagtattagtgtcgtcctcagccccacaaaagtctgcccaacagatggcagtcctcggccaccatggtgtagacagtggctcccaggctccacacgcccaccagggtacatcgtacttttgtcccggggaacagttctgaggctgtataagaggagctcccaccgaaggggatcagctttcagcctacggtgaatctggtatcaaagccagcgtctgttgtttccatgtcgtgctgagcctcctcagggaagttctctgacttcagatccctgtggataatttccttctggaagcctcactgcatggaatatcctatttgctggaacttgcctcaggcctcttcccccttcaagaagaattcgagggtgaagtcggatagctctcccgagctggcttaatccatgactaggaacagcctgttctcggtgccagccacgtgggtctgatgatcttcgggtgattaagggccttcatcatatggtccctgcagtacagaccctgggggctgcaggagccctgctgccctgttggggtgacctccacagccatcttggtcccagtgagaatgtgctgggccagctgccttgacttctgcaaagctgccctggctgatgaccttgaggagcctatgatcatcagtaagggactcctcggaggcagaagtggttccaaggccctgcagcgtggtgacctcccggctacacatctcagctaggaatgccaactgagaatactacccctacaaactttgctaaccaggaacacgaatgacacggctggaggtgtctgctgacatgtgagggtggcctctggtcacctccatgccagggacaacgttcgaggccaactctaccatggctgcacccaggaaccggatgatgtcatcaggaatcatctctcccggcctcttggccctgctgacttccctctgagttgatgtcattctcaggtgggctcttcctccaacgtggcaagatggcacccacagctccagcagcctaacggaaatagatcttctccgcccagatgtttccaagacaatgacctgacctttggcactgagtgtgtcacatgagcaggccttagccaatcactgtggacaaagaagatgggatcagcccattggccaggttgaggtcatgtggccactgtctctatggaaacttgggagatgcttaactgttttcagttgggagactctgtggtggctgagagagcaggttcaggctcgaaaggtcactacaactggatatgcaactgcagaagaatgactttggacgcctacctcacaggatatataaaaaatgaatgaaacaacagctaacaaggggccagaaagtgctagtctcctggagtgtatgatacacaaaaatcagatcaaaatcgatcagtgttataaatggaaacgttgaaactagaaagctattagaagcaaacaaagggtaattttttataaccccatctaaggtcatgaaaacccatagtgattttagagatgacaccaaattacaagcaaaaaaacaaaaagtagatacatttcagttcactattttgtacactctatgagttttaacaaatgtgtaataacctgtacccatcattatgtgtcatacagaatggtttcgctgccctgaaaatcccctgtactccacggccttagaggtctggcggtgtgagcctcgtcattgatgttttgggtggtggggaatgtaggtgtttttcagttactatcctccgctttagggcagaaaagagaggaattccccacctagccccaggttttcataaaaccataagtaatgaaggaacccaatactgcaggtgaagaaatgaatcgtcaggatatattgatccgtgggattatcatagtaaaaatagctaagaaataaggaaggagatcacattttagaacccaacaatgcagcttgaattctgcatggatcttgagctactcatttggactttgtgaattcagtgtgaatgttgcttcccaggcaatgggggacgcatgcacttgccggtgctcgtgcacacgggattggcgtgcagatgtgtgcgggccgcacaggggatgttctgcagctgccctgggccctgggtgtgtgaggctgcccccctgccatgttgaactttaaagggtgtgatgccggaatgttgttggctgagtccggactggcatgagcccttctgatcctgttacctcacaccttgcctggcatcatcccaaaaggcgtttgtgcaaatggcttattgacacgggcttgggaccaaatccacccaaggggagggggtccctggggccttgctatctgtggacttggatgaaatcatagtgcctgggggtggagaggatgaccctcagatatgttttccaactcgtgtttttcttctagatgcaggaccccagatgcagagccccagggcatagaggattccagattcttgcaggggactggaggaggctcggctgaaaggagtcagggctgcgagggtaggggacagattcgagtagtttctccatttcacagcaataattactgccccccaccacacacacacacacacacacacacacacatgcacacacatgatatatgcatacacctgtctgtgctgcaagttccccttttgctcagacttagggttttgcagacacttctaaggaaacaaagatgttcccttttatttttgtctacttgctcctgaagcttcccctccatgtgtgcaatatgactgatgccaactgctttctttctttcttttttcttttcttctctctctctctctctttttttttttgagacggaatttcactcttgttgcccaggctggagtgcagtggtgtggtctcggctcactgccacctctgcctcccgggttcaagcgattctcctgcctcagcctcctgagtagctgggattacaggtgcccaccaccacaccaggctaatttttgtatttttagtagagacagggtttcaccatgttggccaagctggtctcgaactcgtgacctcaggtgatcaacccgcttcggcctcccaaagtgctgggattacaggcatgcgccactgcgtccagcctattttttacattttaaatcaggcaattataatatatcaaacatctatattccaatcacccagaatggagaattactgaatttggttatattcactttgagtcttttaaaaataacattttacaaacaagtagtctcccgttggctccccagacaatccaatttctcttctccctgtttcccagagcaggcaaatatcattatttattcggtgtatatacttctattctgaatttcatacacatacattatatacatccaaatacatattaataacatttaagcatgtattaatatacaaaacacatatatccgttaacattacctaggattgtttagtgcatttacatttttacatatatacaaaatacgtatacttattatgtttgattctattttttggttaacttgttctttaaagatgaatctagctgggcccgaggcaggcagatcacctgaagtcaggagttcgagaccagtctggccaacatggtgaaaccctgtctctactaaaaatacaaaattagccgggtatggtggtgggcgcctgtaatctcagctactcgggaggctgaggcaggagaattgcttgaacccaggaggcagaggttgcagagagccaagatgtgccactgcactccagcctgggagacagagcaaaaccatgttaaaaaaaaaaaaaaaaagaatcctctggtcttgggaatctaatgccctatattataattcatagccagacacagagtaattacttgtttgcacccagcgttctaaccacaggaagggaatgggggaagtgggtttttgcaagaacctgctttgaggtgcacacctccacagagctaagcaatctagtctgggagataatactcatacgtgtccaggaaatgaggaacaaccagatagcacataattaaaacaccatattttatgatgcagatcatttaagaaatgtgggaggctggatgcagtggctcatgcctgtaatcccagcactttgggaggctgaggcgagtggatcaagaggtcaggagttcaagaccagcctggccaacatggtgaaaccccgcctctactaaaaatataaaaattagccaggcgtggtggcgggcacccgcaatcccagctactctggaggctgaggcaggggaatcacttgaacccgggaggcagaggttgctgtgagccgagatcatgccactgcactccagcctgggcaacaagagtgaaattccatcacacaaaaagaaagaaaaggaaaaaagaaaagaaaagaacaggaaagaaagaaagatgggatgagtcacactgcacacttgcagaagtttcaggagcaagatgacaaaaattaaagggaacatctttgtttccttagaagtgtctgcaaaaccctaagtctgagcaaagggggaacttgcagcaccagacaggtgtatgcatatatcatgtgtgaatatgtgtatgtgtgtgtggtggggggcggtaattattgctgtgaaatggagaaactactcaaatctctcccccaccctcgcagccctgactcctttcagccgagcctcctccagtcccctgtaagaatctgaaatcctctatgccctggggctctgcatctggggtcctgcatctagaagaaaaacacgagttggaaaacatatctgagggtcatcctctccacccccaggcactatgatttcatccaagtccacagatagcaaggccccagggaccccctccccttgggtggatttggtcccaagcccgtgtcaataagccatttgcacaaacgccttttgggatgatgccaggcaaggtgtgaggtaacaggatcagaagggctcatgccagtccggactcagccaacaacattccggcatcacaccctttaaagttcaacatggcaggggggcagcctcacacacccagggcccagggcagctgcagaacatcccctgtgcggcccgcacacatctgcacgccaatcccgtgtgcacgagcaccggcaagtgcatgcgtcccccattgcctgggaagcaacattcacactgaattcacaaagtccaaatgagtagctcaagatccatgcagaattcaagctgcattgttgggttctaaaatgtgatctccttccttatttcttagctatttttactatgataatcccacggatcaatatatcctgacgattcatttcttcacctgcagtattgggttccttcattacttatggttttatgaaaacctggggctaggtggggaattcctctcttttctgccctaaagcggaggatagtaactgaaaaacacctacattccccaccacccaaaacatcaatgacgaggctcacaccgccagacctctatctaaagccgtgaagtacaggggattttcagggcagtgaaaccattctgtatgacacagtaatgatgggtacaggttattacacatttgttaaaactcatagagtgtacaaaataaagagtgaactgaaatgtatctgctttttttcttgtacttttggtgtcatctctaaaatcactatgggtttttatgacctaagatatggatcataaaaaattaccctttgtttgcttctaaaagctttctagtttcaaggtttatgtttacgacactgatcgattttgagttgatttttgtgtatcataacgtgcattagactagcactttctggccccttgttaactgttgttttcattcatttttctatatcctgtgaggtaggtgtccaaagtcattctgcagttggatatccagttgtagtgaccttccgagtctgaacctgctctctcagccatcacagcgtctcccaactgagaacagctgagcagctcccaactttccatggagacagtggccacatgacctcaacatggccaatccgcagatcccatcctctttgtccacagtgattggctaaggcctgctcatgtgacacactcagtgccaaaggtcaggttgttgtcttggaaacatccgggagaagatctatttcagttaggctgctggggctgtgggtgccatcttgtcaccttggaggaagagcccacctgagaacgacatcaactcagagggaagtcagcagagccaagaggccgggagaggtgattcccggtgacatcatctggctcctgggtgcagccatggtagagttggcctcgaacgttgtccctggcatggaggtgaccagaggtcaccctcacatgtcagcagacacctccagctgtgtcattcttgcttcttgttggcaaagtttgtaggggtagtattctcagttggcattcctagctgagatgtgtagctgggaggtcaccacgccgcagggccttgggaccagttctgcctccgaggagtcccttactgatgatcataggctcctcaaggtcatcagccagggcagctttgcagaagtcaaggcagctggcccagcacattctcactgggaccaagatggctgtggaggtcaccccaacagggcagcagggctcctgcagcccccaggatctgtactgcagggtccatatgatgaaggcccttaatcacccgaagatcatcagacccacgtggctggcaccgagaacaggctgttcctagtcatggattaagccagctcgggagagctatccgacttcaccctccaattctccttgaagggggaagaggcctgaggcaagttccagcaaataggatattccatgcagtgaggcttccagaaggaaattatccacagggatctgaagccagagaacttccctgaggaggctcagcacgacatggaaacaacagactctggctttgataccagattcaccgtaggctgaaagctgatccccttcggtgggagctcctcttacgcagcctcggaactgttcccggaggcaaaagtacgatggactccggtgggcgtgtggagcctgggagtcactgtctacaccatggtggccgaggactgccatctgttgggcagacttttgtggggctgaggaggacactaatactctgtgaacgatgacaggagatcccgtttctcatttccatagaactagaacgcctcataaacacaattctggcccttgactccagggagaggccctcactagaccacatcatggggcgcccatgcgttaacatgggtcaggaggagacataaataaggccatactgggagctgctccccgatcacccggcgtctggaaagctctcgtggtgtccccgggagatgaggccaaccacgtcccatccttgtaggaacaaaaatgtaggaacaaaaatttttagtagagacggggtttctccattttggtcagggtggtctcgaactcctgaccacaggtgatccactcgcctcggcctcccaaagtgctgggattacaggcgtgaaccactgcgcccggcccacaacatggatttttcttactataaacatcaagctacacttgccacagtcttttaccgctgtggtctcatttgtctccaccagagggagaaaggagactcaataaaaactgcatggttctcggccgggcatggtgcctcacgcctgtaatcccagcactttgggaggccgaggcgggtggatcactgacgtcaggagttcgagaccagaccagcctggccaacatggtgaaaccctgtctctacaactactactactaataataataatacaaaaattagctggacgtggtggtgtgcacctgtgatcccagctactcgggaggctgaggcaggagaatcacttgaacccgggaggcaaaggttacagtgatccgaaatcacaccattacactccagccttgggcaacactccatctcaaaaagaaagaaagaaaaaaacctgcatggttctctattcccataaatatactgcaaaataactttgccctcttataatctgagtgatttatgatgtccaaaaaaatagattctttcactcaagaagtatttattgaccaccgacaacatgccgtttccccagaacattaaggcagttcaaaaaatattgaaaaatggaaaagtaagcatattggaacataaaacattgtttaaatatttatccccaaactattaaaaattttaatttcctgctctcaaatgtttgtaaaaacttttttattttttcatatttttggagtcaaggtcttgctctgtcacccagactggagtgtagtggtacgattacagctcactgcagcctcgacctcctgggctcaagcgatcctcccacctcagcctctggagtagctgggatgccagccaatccacatactgaataccactctttcagggcatgggaagtttgctgagaaacaattccttttacatgactgacaaaggaggaaatgatgtttgtgttttgtgcttcagttccacatgttggtcaaagaatagataatctaagatagtgttactcactcatcttgtggttggaagttggcaaccagagtgatgaattgttgactgccaagccttgtttctctcccacgtggcctcttacactccagcaggtcagcactttttgacatccagttaattgttgtttcattaagttttgtataccacatgaggtaggggtctaacttcattctttttcatttggatatccagttgtaaaagcaccatttgttaaaaatactgatttttcactttgggaggctgaggctggtggatcacttgagatcaggagtccaagaccagcctggtcaacatggtgaaaccccttctgtactaaaaatacaaaaattagccaggcatggtggcatgcccctgtaatcccagctactcaggaggctaaggcacatgaatcgcttgaacccaagaggcggaggctgcagtgagccgagactgcgccactgctctccagcctgggtgacagagtgagactgtcttttccccattgaatggtctttgtgcacttgtcaaaaaccagttagctatggatatgggtttatttctggactctcaattctaccccattgttccatgaccctatccttatttcaatatcacacctgtgattacagaatttttgtattaagtttggtaattggaaaacatgggttttccaactttgtttttctttgacaagattgtttcaaaccttgaaattctacatattaataaattataggatagtttctccatttctgcaaaaagggccactgggattttgataaggatttcattgaatctatacattgctttggattgtgttgtaatcttaattattctaagtcctctgatccatgaatatgggatgtctttccatatatttaagctttcttcattactttcagcaatgttttctagtttttagcacaaatctctcaccttttaagttaaattcatacctaggtgctctactcttttggctgttactataaataaaattatttccttaattttctctttggagaattcgtttgaagtatatagaaacacaactgagttttgcatattgatcttgtaccctggagccttaaaaatttgctctaatcattttttgtggattctttgagattgcttgtgtattggatcttgtcatctgggaatcaggataattttacttcttcctttccaatttgaatgccttttatttgcttttcttgcctaatttttctagctaaaactttcagaacaatgtttaataacgaagtgaaaatgggctccttgtcttcgtactggacttagaggtgaagcagccagtcttttgctatcaattatgatgttagctgtggtttctgatttatgtcctctatcatgttaaggaagttccctcttattatttctgaatgtgtttttattaaaaagtattggatttgatcaaatgaacagctgcatttttttaaagcatgattttttcttccttttatttttattttatttatttatttatctttgagacagagtctcgctctgtcaccaggctggagtgcagtgcagtggcatgatctcagctcactgcaacctctgcctcccagattgaagcaattctcctgcctcagcctcccgaatagctgggactacaggcgagtgccaccacgcccagccaatttttgtacttttagtagacacggggtttcaccatgttggccggaattgtctcgatctcttgacctcatgatctgcctgcctcggcctcctaaagtgctgggattacaggcgtgagccacccaccgccttcttccttttattaatgtggtagattacattgattgatttaactaaattgaatgtcctttgctttcctggggtattttccatttggacatggtatgtaatttttcaaatacgctattagatttgatttgctagtattttattggagatttttaatctgttatcttaaaggtattggtctatagttttcttgttatgtctttgtctggtgtgttaccagtgaaatgctggcctcatagaataagttacaatgtgttccctccttttctattttttgggggattttaaaggtttgatcagattcactagtgaggccatctaattgtgagcttttctttgtaggactgtttttattactaattcagccttttttcatattatagatctattcaaactttgtattttttcttgaatttgctttgttttttatttttgtttttgttttgagacaaggtctcactctgtggcccaggctggagtgcagtagcgagatcttggctcactgcaacctctgcccccttggttcaagcaattcttgtgcctcagccaccgagtagctggggttacaggtgtgcaccaccacgcctggctattttttgtatttttagtagagatggggtttcaccatgttgccaggctggtctcaaactactggcctcatgtgatccgcccacctcagcctaccaaagtgctgggattacagtcatgagccatcacacccggccttcttggatctgttttaataatttgtgcattttaaggaatttgctcatctacattacagaatttattcatgtatacttcattatattctccttttttatttctgcaaggtcagtaataatgtctccatgttcatctctaatttatttatttgcatttgccctctgtcatcgaggacagactacctaaaggtttgtcagtttgccaatcttgaagaaccaacttgtggtgtcactgattttctctgtgctttttatattctctatttcatgtacattcattctaatctttatttctttctgtctgcccacttttaatttactttgctattctttttgtagttccttgagattaaaagttagattattaatttgataccttttttcttttttgaagaaacttgttaaaggtttaaatttgcgagcaatgtttctacagaatctcacagacattgatatgttgtgtttccaatttcatttctctcaagatattttctaatttcacttgtgcattcttttttgttttgtttcgttttgtttgagatggagtctcactctgttgcccaggctgtggagtgcagtggcgcaatcttggctcactgcaacctctacctcctgggtttatgcgattctcctgcctcagcccacccctgccccaagtagctgggattataggcgcacgccaccacgcccggctaatttttgtacttttaatagagacggggtttcaccatgttggccaggctggtcttgaactcctgacctcaggtgatccacccgcctcggcctcccaaagtgctggaattacaggcgtgagccactgcgcccagccgtgcattcttctttaaaccattggttgtttatgagcctgctatttaatttccacatatctgaatttcccagcattctttttattgtgaatttctagcttctttctagagcaatcttggaagatactttgtatagtttcagttttttttaatttgctgtgacctgtcccatggcctaacatatggtctatcctggagaatgctccattgcacttgagaggggcgactgctccgctgttggtaaatgcagtgctctacgtaggctttgcgtccaagttggtctatagtttattcaaatcccccctttcatgattaatgcgctgtctgttgggtctatgcattattgcaagggccatattgatgtctccagcttttgtaaaaccatctattttccgccttaaattttgttcatctttacttcttatatttctggtctccatggtttcgtgagtacattgtcatagttttgtttcttcttactgaattgacacttttatcagcatctacagttgaaccttgaacatcttgggggtccgggcactgaccccacaccaccagcagttgaaaatccgcatataggccgggcacggtggctcacgcctgtaatcccagcactttgggaggccgaagtgggcagatcacctgaggtgaagagttcgagaccagactggctaacatggcaaaacactgtctctattaaaaatacaaaaattggccaggcgtggtggtgggcacttgtagtcccagctacttgggaggctgaggcagaagaatcgcttgaacccaggaggcggaggttgaagtgagctgagatcgtgccattgcactccagcctggtgacagagcaagactctctctctcaaaaaataaataaataaatacataataaaataaagttaaaaaaaggaaaaatgtaactacaaaacactaaatgatccttcagcatagaataatttaattacttcttgtttgaaacattatcttttgtaaaaacaaaaaaaaaattaccttttgtatacaatgttcaccatttgggtaacgagtaccctagaaacccaatccgtaccattcagcaaaatatattaataaaatcaacaaatacatgtacccctgaatctaaaaaataaaaatgaaaatgtaatttcaaaataaaaatttaatgttaaaatcagtgtactttattaaattatgtaatgtaatcatatcacttaaaaagtatataatttaattttattttttagaatttcatttaagattaaattagaatttagtaggaaaactaattaacatcaggccaggcacagtgactcacacctgcaatcccagcactttgggaggccaaagcaggcggatcacctgaggtcgggagtttgagaccagcctgaccaacatggtgaaacccgcatctctaccaaaaatacaaaattagccaggtgtggtggtgggcgcctgtaatcccagctactcaggaggctgaggcaggagaatcgcttgaacccgggaggcaggggttgcggtgagccaagatcgcgccattgcactccagcccgggcaacaagagggaaactctgtctcaaaaaaaacaagaaaagaaaagaaaagaaaagaaaaactaataaaaatcatggtaaacggacattgaggtgtacaatgacatataaaggtctccttctttgccttacgaaacccaatttctcgccacaaaaccatccactccttacactgttgcctttcaaatgcttttaataaagaactggtggggaagtacaaagtgtgacaattcatagcaggaaagaggacgggcattaaaagatagggattcaaaacccaggactgtccccactgactcaccccccaactgcggggccacaccccacagcttctcagcaccccctcctcctgcacttcatccacctgtcacatttctgcccgcctggccagcctgtctgcctgcaaggccttggccagtctctccctggctttcttcaccctcctggcctgtctccggatatctgcaggagtcaccaattggccagagaggggcggtgggagctgacaacccattcctggggttggcccccctgccacagctggaaaccgcccaggggtgggctcaagcgggctgcgcacacgctcagcaccagctctgtccagagattcaccggccgtccccggtgcaaggatacttaagacgctctccaaatgcagtggacttgaaccttctccttggctgctgcagggctgcagggcctgcagtctccggtaggcgcagagttgctgcggcttctccaggtgctcgtccccttttctgcgtctgacctggttgtcaggatgagacctgatccttgtcaccggcctccggaagatgcagctggtgagtctcatggggagagcagacctcgcagctcgtctccgatgggccttggccatgtggatttctcgtttcttctgtaaagcccagggcatcatgttccttttgagcttcccctttcaaaagaaaagaaaatgtgaaatttcaaccaaatggagacaggagaagatcagctgtggggggcttctctcagctcagtggaatcttcccaccagcctctctttctggggaaatgtgtctcaaatggcagtgtacatcctcagcacctgcagggtttgctgaagtcagatatgtggacctgaacccaagtaagtctggggtggaacctagagtctgcatttctccgtgtgaccctgatgctgctggcaggagctccaggcattgacactgggtcctgggacctcatcgggctgatgcgagtcaaggactaaatgctcaaggtcatgacccagggtcagttccagaccttgtccctcctcatcctcctcagaggacacccctctcttctcttccctgccactgtcagctacacagatgctggtgcctcctaacccatccccaacaggacaccgggatcccagacttccctgttcaccaagacctcacgcttctctgtatctctttctgctgtgcttcaggacacaacgtcattttcatagctccttgactctctggtttccaaagaaatcgtgcactcgccaccttaaatactcactgccacacccagatcccaccttcacctgaacacctcctgctcatgaagaaaaacctcagaaacaccatgttgctttctgtttctaataagctcaattaactagagttacaccatgagagaatcttttgatgacatactgagaaagatgattaagcccctcctaagatttgaaatcctttcttgctctaaatcaattggaagactctagtctcataaagctgtttcagatacaaacataaagccttcatttctgtccttctcatttcatttctgttgtcctggcattaagattaatactaccccttacacgacccaaggtgttcccctttggagggaaaattatttagtctccttagttacagggcacttatgatgtgccaagctgtgcagtagaacccctgatccagaagtaaactgcagaaatcaccactctgttgattttcatcttggtgagaaggaagacataataaacacactaaaaacaaatttccgatagggtatcagatataattaagttccatgatgaagaagaagggagagacagagagggatggaaggaggagaaacagagaaacagaaaagaaagaaattcactacaatgaatcatgacagtgagtttagggaaggactaaccaatcatgatatttaaccagagaactaaaatttttttttaaagggaccaagcaatttctggttcaagaactttccagagagagagacaatttgaagactgcaaggccaagtaatacctcttttccttcttagtgatgttgttggacttttaaaaaatcagggctattatccccagatagctccgtgaacaaaaaattagaatattgttgaatattttgaatattacttgagtattactcaacaaatattaacacctagggtataagtttccacgagatagcatctagttttgagaacaacttgctaaactgtgaagatgttttacagaaagaaaaaggaatacaaatggacattattttggtcaatagtcaataaggatcccatactcaccagaacaggcaggcttggaaaagaggtgaacgcaggttctcccatagctgtagagttcctcctgctgaccccactcctgaggcacagacagcccttggcttgccggaaaatgcagtggcttctgcatctagctcctcttttatagagggagtgataatgcaatcagtggataatccatagggaacgccctgtctccacccattggatttgaagcatttctaaatctttatacagaaaccaatatggtgttaccaacacagaatgtcagtagaaaaagaatttaatccgtgtgtgtggcggggtggtatttacagttaatatcggcattttagatatgtttccttttcctcccattctctcaaacatctttgaaagcattctacggaaataagaatggaattgtcggccgggtgcggtggctcaatcctgtaatcccagcactttgagaggccgagtcgggcggatcacctgaggtcaggagttcgagaccagcctcaacatggagaaaccccgtctctactaaaaatacaaaattaactgggcatgatggtgcatgcctgtaatcccagctacccgggaggctgaggcaggagaatggtgtgaacttgggaggcaaaggttgcagtgagccgagatagtgccactacactccagcctgggcgacagagtgagactccatctcaaaaaaaaaaaaaaaaaaaaaaaaaaaaagagagaagaaacaaaaagaaaaacacctaataaataaacagacctaataaaaaagaaatacagtctcagcagccttggtctatgcagtgactactcagttttttcctattatttttcatgatgttttcattgtataaatcttcctggtttgatctttgaggaggcagacagatgctggctattttaccaatttggacctggggctaggaagtttaagacacaattagcttacgtatttaatcacattgtggcaatttcaatgcaccgatgcctcccctgcaaactccaatatatagacacaatataccgcgctctagcctgggcgacagagtgagactccatctaaaaaaaaaaaaagaaagatctcctattaatgaaaatgcagagagaaatgggtgttagaaaatcatattggaaaagatatttgcatgatgtgcatccagtaaagtacatcaagccagaatacagactagaaagatgtccatcaaatgaaaaaaaatactaaaaattgatgtgcaaaatgagtggaaaacttcagtaggcactattgaagagagaataaataaatggtcaatacaatcctgaacacatgcccaaattctgtttagcttcagataaacgctgatgaaaaatcactatgagatactcatatacacttctgtttggctaaaatgaaaaaatagcaatgccaagtgcagacatggctatggagcaatcataccattcacgtgtagccagtgagagtttaaatgggaagaaatgtactttatttgtatcccaacctgaacgtacattggaatctcctggagagtttgaaaaactaatggtagcacacacccctacacatttttattccactgatgttggatgcagcctaggctataggaattttacaatcccctaaagaccaaaaggacaggcaaggatgacacaccacttccctggttggtttggagtctgtggttttgaactttggtttgcagaaaacacacctgggagtgttttcacacctgggtgccttccagaccagtgtctccggatgcctacgggaggggccaggaaatcagaaatcatttatttatttatttatttatttagagtctccctctgttgcccaggctggagtgcaatgacgtgatctcggctcactgcaacctccacctcccgggtttaagcaattctcctgcctcagcctcccaagtagctgggtttacaggcccaagacaccacgcccagctaatttttttttcttggagacagagtcttgctctgttgcccaggctggagtgcaatgacgtgatctcggctcactgcaacctccacctgccaggttcaagcagttctcctgcctcagccttccaagttccaagtagctgggattacaggcgcctgccaccacatccggctattttttgtattttttttagtagagacgaggtatcaccacgtcggccaggctggtctcaaactcccgacctcaggtgatccacctgcctcagcctcccaaagtgctgggatgacaggcatgagccaccacgcccagccacgcccagctaatttttgtattcttggtagagtcagggtttcatcatgttggccaggctggtcttgtcctgacctcaagtgatctgcccacctcagcctcccaaacagaatttattgttattattatttttaagaactccaagtcctgccagggcagggtggtttacacctgttatcccagcactctgggaggccgaggcggacagatcatttgaggtcaggagtttgtgaccagcctggccaacttggtgaaaccccatctctactaaaaatacaaaaattaggccgggtgtggtggctcacgcctgtaatcctagcactttaggaggccgaggtggttggatcacttgaggtcaggagtttaagaccagcctggccaacatggtgaaacctcatcgctactaaaaatacaaaaattagctgggcgtggtggcaggtgcctgtaatcccagctactcaggaggctgaggcaggataattgcttgaacccagggggcagaggttgcagtgagccaagatcgcaccagtgcactccagcctgcacgacagagcaagactctgtttcgaaaaaaaaaaaaaatacaaaagttagctaggcttggtggtgggcacctgtaataacagtgactcgagaggctgaggcaggagaattgcttgaatccgggaggcggaatttgcagtgagctgagatcgcaccactgcactccagcctgggtgacagagccagattctatctcaaaaaaaaaaaaaaaaaaaaaaaaaggaactctaagtccttcatttctaagtcaagaagaggacatttctgtcatttcgggggtctcagattttgcagctcatttgaatttcacagtaaaatttaaaaggactggtgtctggatcccaggcaggatcatttgcatccatataatggagtttgctgaggtgctgagggagacatcagtaccttgaaattgccctacaggattaaatctgtaagctaattgtgtctttttttttttttttaatttgagacggagtcttgctctgtcgcccaggctggagtgcagtggcgcgatctcagctcactgcaagctctgtctcctgggttcacgccattctcctgcctcagcctcccgagtagctgggactacaggcccccaccaccacgcccagctaattttttttgtatttttcagtagagacggggtttcacagtgttagccaggacggtctcagctcctgacctcatgatcctcctgctttggcctcccaaagtgctgggattacaggcgtgagccaccgcacccggccctaattgtgtcttaaacttcctagtcccaggtccaaattggcaaaatagccagtatttctctgcatccccaaagatcaaaccaggaggatttacacaaggaaaagattgtgaaaaatcataagaaaaaactgagtagtcactgcagagaccaaggctgcagaaattgtattttttttatctgtttatctattaggtgttgggtgtttgtttgtttgttttgagacaaattctcactctcaccccagctggagtgcagtggcgtgatctcagatcactgcaacctccacctcccaggttcaagggattcatgtacctcagcctcccaagtagctgggattacaggtgcccaccaccatgcctggctaatttttgtatttttagtagcaacagggtttcatcatgttggccaggctggtctcaaactcctggcctcaaccaattcacctgcctcggcctctcaaagtgctgcgattagaggcgcgagccactgcacccaggtgtgtgggggttttgtttgtttgattgtttgtttgttttttgagacagagtctcgctctgttgctcaggctggagtgcagcggcgctatctcggctcactgcaagctccacctcccaggttcacgccattctcctgcctcagcctcccaagtagctgggactacaggtgccccccaccatacccggctattttttgtatttttagtagagacagggtttcaccgtgttagccaggatggtcttgatctcctgacctcgtgatccacccgccttggcctcccaaagtgctgggattacaggcgtgagccactgcgcccagcctgtgttgtttttaattgtatgtatttaaggcatacatgatgttttgatgcacgtatatgtagcgaaatgattactacaatgaagcaaaggaacatatccgtctcctgatgtaattacctttgtgtacgtgtgtgtagaaagagtagctgaaatctactctttcggcaaattcccagtatacaaggcggtattcctgaggttgttttatggggtggaagtttgccacagattggccataagcgggagtttatatctcagtctcttttcctcaattgttattgccatagaacttacatagagcaaagtgcaaaaaatcagacacatacatcttcacgaactttcacaaactgaacgcactcatgcccagcactgaaatcaatgaatagaatagcggattcatccccaggtgccttttcctgctaccccatcctgcctcccacaaaggcaccctctgttgtaacagcacctaggattagtttggctggtttttgtttcacgtgtagggaaccacatggtatgcactgtcttgggtttggattaacctcagctttgagagatcaaggcttaaggttgtgccggttgtcatttgtgagttctgattgctgtgagaagatccgatgggtgcagatgccccagtatttattcattctcctgctgttcattggctggtttctgacaagagctattatgactgcaggttctgtgccccgcagaacatgaaattggtgggcacgcatgtacaatgttgagataaatgctgtgtgcaagggaagagggtagacgtttatacggcttttggggtttgtttgagacggagtctcgatctgttgcccaggctggagtgtagtggcacgatctcggctcactgcaaccctcgcctcccaggttcaagcaattctcccacctcagcctcccaactagccgggattacaggcacccaccatcaggcctagctaatttttgtatttttgtggagatggtgtttcaccatgtttgcctggctggtcttgaattcctgatctcaggtgatctgcctgcctcggcctcccaaagtgctgggattacaagcttgagccaccgcctgtttgttcttttgagacagtctctctctcacccaggctggagtgcagtggcgcaatcttgtctcaccgcaacctccacctctgggttcaagcaattctcctgcatcagcctcccgagtagctgagactacaggcgtacgccaccatgcctggctaatttttttgtattttcaatagagaggaggtttcaccatgtcggccaggctggtctcaaactcctgacctcaagtaatccgcgcgcttcagcctcctaaagtgctgggattacaggcgtaagccactgtgcccagcctacagcttttgtttttgagacagggtcttgctctgtcacccaggctggagtgcagtagctcaatcacaactcactacagccttgatctcctgggctcaagtgatcctcccacttcagcctcctaagtagatgggactacaggcaggcatcaccatgcctgacaatgcttattttttattttttgtagagataaggtcttcctatgttgtccaagttgcttctagactactgagctcaagcgatcctcccacctctgcttcccaaaatgctgggattacaggcataaaccaccatgcctggccctatacagctttaatagatgtttgcatatagttttccaaagcggttattccaatttaaactcccactatccttacgggaaagactggtccctccataatctagtcagcacttggtgtttctgcgtttttccctttagctaagttgatatctatataatagtatctcattgtaatttttatttttttagcatttccctgaagctaaaagggttaaacatttgctcaaattttgctggtcatttaggccgggcgcggtagctcatgcctgtaatctcagcaatttgggaggccaaggcgggtggatcacttgaggtcaggagttcaagaccagcctgggcaacacggtaaaaccctgtttctactcaaaatacaaaaattagctggacgtggtggtgggagcctgtaatcccacctactcaggaggctgaggcaggagaatcgcttgaacccagaaggcagagttgcggcgagccaagatcgtgccactgcactccagcctgggtgacagaacaagactccacctgaaaattaataataataataatgatgataataattttttacggtcacttgtttatattcttttgtgtaggatccattcaagtttttcacccagtttcaagtgtgttttcattatttttctctgtttgtttgacattattctcttttttttaaatattaagattttttttatatatatactctggcttgatgtactttcctgggggtacaggatccaaacctcttcccccactccggttttccacgctttctctcttactgatgtatttgaatgaatagttgctcttaatgtatcttaatatggttcaaatttgaattttctcctttctatttagagtttcattgtatcaagaaggcagattatctcctcattgactgtgaagctgttcttctacctagtttttaattaaagctatttactgtgttttatacttagaactgaaactaagagtataagaaattaggccaggcacggtggctcacgcctgtaatcctagcactttgagaggccaaggcaggtgaatcacttgaggtcagtagttcgagaccaccctggccaacatggtgaaaccccgtctcgacaaaaaatacaaaaataagctgggtgtggtggcatgtgcctgtagtcccagctacttgggaggctgaagcaggagaatcattgaacccgggaggcagaggttgcagtgagctgagatcccgccactgctctccagcctgggtgacagagtgagaccccatctcgaaagaaaagagagaaaagaaaggaagacaggaaggaaggaagacaggaaggaaggaaggaaggaaggaaggaaggaaggaaaattaaaatgagactgaacctagaaaaaaggtagattagcaaagtggaacaaggttcaagagcaaatattcccaccaaagcatgaacaacattggaaacttcagagacaagtgggatgtgattaaaagaagagtagagagaacttggacaagaatggatatcagaagtgaaggatacatatgcaccttccaaaccaatgaaagacatcaacccacagatgcaattgactccacaccctctaggcaaaggaaatacacaggaagcaataatgagctacactgtggcctacaaaccaaccacaacgagaaagagtttagagaatgtggaaagcaaagaagcaaggaaaagcctgacagctgacatctcaacacaggtaaaatgagatagacatcagtggggcaccatttctaatatgctgaaagaaatttgtcaaaccagacacccgtacctgacagcaatattgcccccaaataaagatgcctaaataaaagtgtaaaggaaaacaattagttgttagcagcattgaattagaagaaaaatactagaatgaattctcaagtccacagggaaataatcccagattgaatgctagaaatgcagaaaggaacaaagatgaatgcacaagataagctgtaggtaaatattagtgcatattgctttatgaagcaatactagaaatgtctcctggagagtaaaatatgtgtagaattaatatgcatgagaatggtaatacaaaagtcagaaacagctaaaaagagaattaaaagtgttctaaagtattagcattttgtgggaggggttaaagtaattaattgtatcagagtatatgatttaattattagcataactacacagatttgtatggctgtaactagcaagttcatggagataacaataaaataataaacatatttaattcaaagtcagtcaagtaaaggcaaaaggaacgtgagtcagttaagtcaaaacctaggaaaaatgagatgattgaaacaatttcaaatttactggtaattatattaaatgtaaatgcacgaaatagaacttttttttttttttttttttgagatggagtctcactctgtcgcccatgctgagctgcagtggtgcgatctcggctcaccgcaacctctccctcccaggttcaagcgattctcctgcctcagcctcccgagtagctgggattacaggtgcatgccaccacaccagggtaagttttgtatttttagtagaaatggggtttcaccatgttggccaggctggtctcgaactcttgacctcaggtgatctacctgccttggtctcccaaagtgctgggattataggcgtaagccacctctcccggccaaagtagtaatttctttgcaacaactgtgtgatatattctataggattgtgaataaaagttttgggctttcttttcttaaagaacatttaaatggtctttagttgttgttattaaatcaaatattacgtgaacatttatgtacatagacaattccattcctatttctatagaaagtattcaaagatgtttggaaaactgggagaaaaagggaaacatatctaaaatgctgatattaactgtaaataccaccccgccacacacacatacacacgtattcaattctttctctactaacactctgtgtaggtaacaccacattggtttctgtataaagatttagaaatgcctcaaatccaatgggcggagacagggtgttccctgtggattatccactgattgcattatcactcgctttctctataaaaaggggaaccagatgcagaagtcactgcattttccggcaagccaagggttgtctgcatctcaagagtggggtcagcaagagaaactctacggctatgggagagcctgcgttcacctcttttccgagcccacctgttctggtgagtacgggatatttattgattacaggaatgtccatatgtgtcctttttccttctgtaagacagctttacagttagcagtgggttgttcttaaaactggatgttgtggaacgttatacctcaggtgttaatatctgttgaataatgttcaaagtattctcatttttgcccatgaaactgtatggggataatagctttgaattttttttaaaaatccaacatcactaggaaagggaagaagtatgatttggccttgcagtcttcaaattgtctccttctctggaaagctcctgaaccagaaattgcttggtccgtttttttaaaaaaacaaaaaacaaaaaaaattagttctctggtaaaatttcatgatgagttgcttattccctaaactcactgtcacgattcattgtagtgaatttcttttctgtttctctgtttctcctccttccatccctctctgtcactcccttcttcttcatcatggaacttacttatatctgatattccaccagaaatttgtttttagtgcgtttattatgtcttccttctcaccaagatgaaaatcaacagagtggtgatttatgaagtttacttctggatcaggggttctactgcacagcttggcacatcataagtgccccgtaactaaggggactaaataattttccctccaaaggggaacatcttgggtcagtattaatctttatgccaggggtactgtaaggggtagtattaatctttatgccaggacaacgaaaaatgaaatgaggaggacagaaacaaaggctttaaaatggaaagtgcactgatgaggtttgtgggggaaacagctttatgagactagagtcttccaattgagttagagcaagaaaggacgtcaaatcttaggaggcgcttgatcatctttctcagtatgtcatcaaaagattctctcatggtatacctctagttaattgagcttattagaaacagaaagcaacatggtgtttctgaggtttttcttcatgagcaggaggtgttcaggtgaaggtgggatctgggtgtggcagtgagtatttaaggtggcgagtgcaggatttctttggaaaccagagagtcaaggagctatgaaaatgacgttgtgtcctgaagcacagcagaaagagatacagagaagcgtgaggtcttggtgaacagggaagtctgggatcccggtgtcctgttggggatgggttaggaggcaccaccagcatctgtgtagctgacagtggcagggaagagaagagaggggtgtcctctgaggaggatgaggagggacaaggtctggaactgaccctgggtcatgaccttgagcatttagtccttgactcgcatcagcccgatgaggtcccaggacccagtgtcaatgcctggagctcctgccagcagcatcagggtcacacggagaaatgcagactctagggtccaccccagacttacttgggttcaggtccacatatctgactttagcaagccctgcaggggctgaggatgtacactgccatttgagacacatttccccagaaagagaggctggtgggaagattccactgagctgagagaagccccccacagctgatcttctcctgtctccagttggttgaaatttcacattttcttttcttttcttttgaaaggggaagctcaaaagaaacatgatgccctgggctttacagaagaaacgagaaatccacatggccaaggcccatcggagacgagctgcgaggtctgctctccccatgagactcaccagctgcatcttccggaggccggtgacaaggatcaggtctcatcctgacaaccaggtcagacgcagaaaaggggacgagcacctggagaagccgcagcaactctgcgcctaccggagactgcaggccctgcagccctgcagcagccaaggagaaggttcaagtccactgcatttggagagcgtcttaagtatccttgcaccggggacggccggtgaatctctggacagagctggtgctgagcgtgtgcgcatcccgcttgagcccacccctgggcggtttccagctgtggcaggggggccaaccccaggaatgggttgtcagctcccaccgcccctctctggccaattggtgactcctgcagatatccggagacaggccaggagggtgaagaaagccagggagagactggccaaggccttgcaggcagacaggctggccaggcaggcagaaatgctgacaggtgggtgaagctcagtcctgggctttcggtccctttcttttaatgcccatcctcattcctactctgaattgtcacacttttcccttccccaccagttctttaataaaagtatttgaaaggcaacaggtgtaaggagtggatgtttttgtggtgagaaattgggttttatgggatgaggaaggagacctttacatgtcactgtacatctcagtttctgtttaccatgattttaattaattgtttttttttgtttgtttgtttgttttgagacggagtcttgctctgttgcccaggctggagtgcaatggcgcgatctcggctcactgcaacctccacctcccgggttcaagtgattctcctgcctcagcttcccgagtagctgggattacaggtgcccaccaccatgcccggatattttttgtatttttagtagagatggggtttcaccatgctggccaggctggtcttgaactgctgacctcagcaatctgcccacctcggccttccaaagtactgggattacaggcataagccaccttgcctggccgttaattagtttttgtattaaattctaatttaatctttggcctggcgctgtggcttatgcctgtagtcccagcactttgggaggcggagcagggcagatcgtctgaggtcaggagttcaggaccagcctggccaatatggcgaaaccccatctctactaaaaataactaatcaggtgtgggggcggatgcctgtaatcccagctactggagaggctgaggcaagagaattggttgaaccaaggaggcagaggttgcagtgagccaaaatggtgccactgtactccagccttggtgaaactttgtctcaaaacaaaaattccaatttaattttcaaatgaagtcctttaaaaatgaaatgaaattctgtaattttaaatgaaacgaatacattacattataatttgttaaaaatgtattacattttcatttttaaattgagttttcattgtttgaaattttcgaattaggggaacatgtacatgtttgttacatggatatatcgcttaacggtgggggttgcttttgtagtttatgggttacccaaatactgaatatcgtacccagtagctaagttttcaacccatgggtaaactcaattaacctagcctgaaggattattcagtgtttagacattacattttctccctatagtatacgttctcaaggcgaagttggtacgtatcccaagattttttttttaatgaaacatttttaccccatttactctgatgtggttatcagacattttgtgcctgtatcaaaatatctcacgtaccacataaatatatacacatactacgtccctgcccgctgtttgactttgagtttccttacctctttatcattgatcgaaacatggaatggaatacctcatggtaattattttatgcatctcgggttaggtggaaactactggttgttttcactctagcagagttagggtggcaggaagtgcccatcagcagatgctactgcacaccagcccgggcgacagagcaagactctgtgtctaaaaatagatatataatttatatataattataaatacattatatataatttatacataattataaatacattatgtataataaaattatatactatataattatattatatactataatatatttcttatataattatattataatataatttatatgttatataattatattttatattataatataatgtatgttatataattatattttatattataatataatttatatgttatataattatattatatattataatacaatttatatgttatataattatatattataatataatttatatgttatataattatattatatattataatataatttatatgttatttaattatattataaattataatataatttatatagtatataattatacatattatatattaaaatataatttgtatattatataattatatatattaaaatataatttatatattatataattatatatattatgtattataattatatttatatattatatttatataattatatgtaatatatttaattatataatataattatataatatatacgtatattacataattatgatatataattatatataattatattatatatattatattattataatataatatatataatattatattatataattatatatattatatatatatattatatattataatattatatataatatatattatatatatattatattatatatatataatatattatattatatataataattataaaatataatatatattatattatataatatataattatacataactatattatatataatatataatataatataatatgaaataattttatataattatattatattatatatattatatattatatattacatattatatatattatatataatatatactatataatataataaaatatatattatacataatatataatataataatatataattatatataatatatataatatactataatataattatatataattatatataatacagttatgtataattatatattatataatataatatatattatattatataattataatatatataattatatataattatataatataccgatatagtatatattatacaattatattatataattatataaatatgatatataaatataattataatatataatatataattacataatatataaattatatattaatatataatatatgtaagtatataatatataaattatattatatatataatataattatataacatataaattatattatatatataatataattatataacatataaattatattatatatataatataattatataacatataaattatattatatatataatataattatataacatataaattatattatatataatataattctataacatataaattatattatatataatataattatataacatataaattatattatatataatataattatataacatataaattatattatatataatataattatataacatataaattatattatatataaaatataattatataacatataaattatattataatataaaatataattatatcacgtataaattatattataatataattatataagaaatatattatagtatataatataattatatagtatataattgtattatacataatgtatttataattatgtataaattatatataatgtatttataattatatataaattatatataatgtatttataattatatataaattatatataatgtatttataattatatataaattatatatttatttttagacacagagtcttgctctgtcgcccgggctggtgtgcagtagcatctgctgatgggcacttcctgccaccctaactctgctagagtgaaaacaaccagtagtttccacctaacccgagatgcataaaataattaccatgaagtattccattccatgtttcgatcaatgataaagaggtaaggaaactcaaagtcaaacagcgggcagggacgtagtatgtgtatatatttatgtggtatgtgagatattttgatacaggcacaaaatgtctgataaccacatcagagtaaatggggtaaaaatgtttcattaaaaaaaaaatcttgggatacgtaccaacttcgccttgagaacgtatactatagggagaaaatgtaatctctaaacactgaataatccttcaggctaggttaattgagtttacccatgggttgaaaacttagctactgggtacgatgattagtatttgggtaacccataaactacaaaaccaacccccaccgttaagcgatatatccatgtaacaaacatgtacacatgtacccctaaatcgaaaatttcaaacaatgaaaactcaatttaaaaatgaaaatgtaatacatttttaacaaattataatgtaatgtattcgtttcatttaaaattacagaatttcatttcatttttaaaggatttcatttgaaaattaaattggaatttttgttttgagacaaagtttcaccaaggctggagtacagtggcaccattttggctcactgcaacctctgcctccttggttcaaccgattctcttgcctcagcctctccagtagctgggattacagacatccgcccccacacctgattagttatttttagtagagatggggtttcgccatattggccaggctggtcctgaactcctgacctcagacgatctgccctgctccgcctcccaaagtgctgggactacaggcataagccacagcgccaggccaaagattaaattagaatttaatacaaaaactaattaacagccgggcaaggtggcttatgcctgtaatcccagtactttggaaggccgaggtgggcagattgctgaggtcagcagttcaagaccagcctggccagcctggtgaaaccccatctctactaaaaatgcaaaaaatatccgggcatggtggtgggcacctgtaatcccagctactcgggaagctgaggcaggagaatcacttgaacccgggaggtggaggttgcagtgagccgagatcgcgccattgcactccagcctgggcaacagagcaagactccgtctcaaaacaaacaaacaaacaaaaaaaaacaattaattaaaatcatggtaaacagaaactgagatgtacagtgacatgtaaaggtctccttcctcatcccataaaacccaatttctcaccacaaaaccatccactccttacacctgttgcctttcaaatacttttattaaagaactggtggggaagggaaaagtgtgacaattcagagtaggaatgaggatgggcattaaaagaaagggaccgaaagcccaggactgcgcttcatctacatgtcagcatttctgcctgcctggccagcctgtctgcctgcaaggccttggccagtctctccctggctttcttcaccctcctggcctgtctccggatatctgcaggagtcaccaattggccagagaggggcggtgggagctgacaacccattcctggggttggcccccctgccacagctggaaaccgcccaggggtgggctcaagcgggatgcgcacacgctcagcaccagctctgtccagagattcaccggccgtccccggtgcaaggatacttaagacgctctccaaatgcagtggacttgaaccttctccttggctgctgcagggctgcagggcctgcagtctccggtaggcgcagagttgctgcggcttctccaggtgctcgtccccttttctgcgtctgacctggttgtcaggatgagacctgatccttgtcaccggcctccggaagatgcagctggtgagtctcatggggagagcagacctcgcagctcgtctccgatgggccttggccatgtggatttctcgtttcttctgtaaagcccagggcatcatgtttcttttgagcttcccctttcaaaagaaaagaaaagaaaatgtgaaatttcaaccaattggagacaggagaagatcagctgtggggggcttctctcagctcagtggaatcttcccaccagcctctctttctggggaaatgtgtctcaaatggcagtgtacatcctcagcccctgcagggcttgctaaagtcagatatgtggacctgaacccaagtaagtctggggtggaccctagagtctgcatttctccgtgtgaccctgatgctgctggcaggagctccaggcattgacactgggtcctgggacctcatcgggctgatgcgagtcaaggactaaatgctcaaggtcatgacccagggtcagttccagaccttgtccctcctcatcctcctcagaggacacccctctcttctcttccctgccactgtcagctacacagatgctggtggtgcctcctaacccatccccaacaggacaccgggatcccagacttccctgttcaccaagacctcacgcttctctgtatctctttctgctgtgcttcaggacacaacgtcattttcatagctccttgactctctggtttccaaagaaatcctgcactcgccaccttaaatactcactgccacacccagatcccaccttcacctgaacacctcctgctcatgaagaaaaacctcagaaacaccatgttgctttctgtttctaataagctcaattaactagaggtataccatgagagaatcttttgatgacatactgagaaagatgatcaagcgcctcctaagatttgacgtcctttcttgctctaactcaattggaagactctagtctcataaagctgtttcccccacaaacctcatcagtgcactttccattttaaagcctttgtttctgtcctcctcatttcatttttcgttgtcctggcataaagattaatactaccccttacagtacccctggcataaagattaatactgacccaagatgttcccctttggagggaaaattatttagtccccttagttacggggcacttatgatgtgccaagctgtgcagtagaacccctgatccagaagtaaacttcataaatcaccactctgttgattttcatcttggtgagaaggaagacataataaacgcactaaaaacaaatttctggtggaatatcagatataagtaagttccatgatgaagaagaagggagtgacagagagggatggaaggaggagaaacagagaaacagaaaagaaattcactacaatgaatcgtgacagtgagtttagggaataagcaactcatcatgaaattttaccagagaactaattttttttgttttttgtttttttaaaaaaacggaccaagcaatttctggttcaggagctttccagagaaggagacaatttgaagactgcaaggccaaatcatacttcttccctttcctagtgatgttggatttttaaaaaaaaattcaaagctattatccccatacagtttcatgggcaaaaatgagaatactttgaacattattcaacagatattaccacctgaggtatcactttccacaacatccagttttaagaacaacccactgctaactgtaaagctgtcttacagaaggaaaaaggacacatatggacattcctgtaatcaataaatatcccgtactcaccagaacaggtgggctcggaaaagaggtgaacgcaggctctcccatagccgtagagtttctcttgctgaccccactcttgagatgcagacaacccttggcttgccggaaaatgcagtgacttctgcatctggttcccctttttatagagaaagcgagtgataatgcaatcagtggataatccacagggaacaccctgtctccgcccattggatttgaggcatttctaaatctttatacagaaaccaatgtggtgttacctacacagagtgttagtagagaaagaattgaatacgtgtgtatgtgtgtgtggcggggtggtatttacagttaatatcagcattttagatatgtttccctttttctcccagttttccaaacatctttgaatactttctatagaaataggaatggaattgtctatgtacataaatgttcacgtaatatttgatttaataacaacaactaaagaccatttaaatgttctttaagaaaagaaagcccaaaacttttattcacaatcctatagaatatatcacacagttgttgcaaagaaattactactttggccgggagaggtggcttacgcctataatcccagcactttgggagaccaaggcaggtagatcacctgaggtcaagagttcgagaccagcctggccaacatggtgaaaccccatttctactaaaaatacaaaacttaccctggtgtggtggcatgcacctgtaatcccagctactcgggaggctgaggcaggagaatcgcttgaacctgggagggagaggttgcggtgagccgagatcgcaccactgcagctcagcatgggcgacagagtgagactccatctcaaaaaaaaaaaaaaaaaaaagttctatttcgtgcatttacatttaatataattaccagtaaatttgaaattgtttcaatcatctcatttttcctaggttttgacttaactgactcacgttccttttgcctttacttgactgactttgaattaaatatgtttattattttattgttatctccatgaacttgctagttacagccatacaaatctgtgtagttatgctaataattaaatcatatactctgatacaattaattactttaacccctcccacaaaatgctaatactttagaacacttttaattctctttttagctgtttctgacttttgtattaccattctcatgcatattaattctacacatattttactctccaggagacatttctagtattgcttcataaagcaatatgcactaatatttacctacagcttatcttgtgcattcatctttgttcctttctgcatttctagcattcaatctgggattatttccctgtggacttgagaattcattctagtatttttcttctaattcaatgctgctaacaactaattgttttcctttacacttttatttaggcatctttatttgggggcaatattgctgtcaggtacgggtgtctggtttgacaaatttctttcagcatattagaaatggtgccccactgatgtctatctcattttacctgtgttgagatgtcagctgtcaggcttttccttgcttctttgctttccacattctctaaactctttctcgttgtggttggtttgtaggccacagtgtagctcattattgcttcctgtgtatttcctttgcctagagggtgtggagtcaattgcatctgtgggttgatgtctttcattggtttggaaggtgcatatgtatccttcacttctgatatccattcttgtccaagttctctctactcttcttttaatcacatcccacttgtctctgaagtttccaatgttgttcatgctttggtgggaatatttgctcttgaaccttgttccactttgctaatctaccttttttctaggttcagtctcattttaattttccttccttccttccttccttccttccttccttccttccttccttcctgtcttccttccttcctgtcttcctttcttttctctcttttctttcgagatggggtctcactctgtcacccaggctggagagcagtggcgggatctcagctcactgcaacctctgcctcccgggttcaatgattctcctgcttcagcctcccaagtagctgggactacaggcacatgccaccacacccagcttatttttgtattttttgtcgagacggggtttcaccatgttggccagggtggtctcgaactactgacctcaagtgattcacctgccttggcctctcaaagtgctaggattacaggcgtgagccaccgtgcctggcctaatttcttatactcttagtttcagttctaagtataaaacacagtaaatagctttaattaaaaactaggtagaagaacagcttcacagtcaatgaggagataatctgccttcttgatacaatgaaactctaaatagaaaggagaaaattcaaatttgaaccatattaagatacattaagagcaactattcattcaaatacatcagtaagagagaaagcgtggaaaaccggagtgggggaagaggtttggatcctgtacccccaggaaagtacatcaagccagagtatatatataaaaaaaatcttaatatttaaaaaaaagagaataatgtcaaacaaacagagaaaaataatgaaaacacacttgaaactgggtgaaaaacttgaatggatcctacacaaaagaatataaacaagtgaccgtaaaaaattattatcatcattattattattattaattttcaggtggagtcttgttctgtcacccaggctggagtgcagtggcacgatcttggctcgccgcaactctgccttctgggttcaagcgattctcctgcctcagcctcctgagtaggtgggattacaggctcccaccaccacgtccagctaatttttgtattttgagtagaaacagggttttaccgtgttgcccaggctggtcttgaactcctgacctcaagtgatccacccgccttggcctcccaaattgctgagattacaggcatgagctaccgcgcccggcctaaatgaccagcaaaatttgagcaaatgtttaacccttttagcttcagggaaatgctaaaaaaataaaaattacaatgagatactattatatagatatcaacttagctaaagggaaaaacgcagaaacaccaagtgctgactagattatggagggaccagtctttcccgtaaggatagtgggagtttaaattggaataaccgctttggaaaactatatgcaaacatctattaaagctgtatagggccaggcatggtggtttatgcctgtaatcccagcattttgggaagcagaggtgggaggatcgcttgagctcagtagtctagaagcaacttggacaacataggaagaccttatctctacaaaaaataaaaaataagcattgtcaggcatggtgatgcctgcctgtagtcccatctacttaggaggctgaagtgggaggatcacttgagcccaggagatcaaggctgtagtgagttgtgattgagctactgcactccagcctgggtgacagagcaagaccctgtctcaaaaacaaaagctgtaggctgggcacagtggcttacgcctgtaatcccagcactttaggaggctgaagcgcgcggattacttgaggtcaggagtttgagaccagcctggccgacatggtgaaacctcctctctattgaaaatacaaaaaaattagccaggcatggtggcgtacgcctgtagtctcagctactcgggaggctgatgcaggagaattgcttgaacccagaggtggaggttgcggtgagacaagattgcgccactgcactccagcctgggtgagagagagactgtctcaaaagaacaaacaggcggtggctcaagcttgtaatcccagcactttgggaggccgaggcaggcagatcacctgagatcaggaattcaagaccagccaggcaaacatggtgaaacaccatctccacaaaaatacaaaaattagctaggcctgatggtgggtgcctgtaatcccggctagttgggaggctgaggtgggagaattgcttgaacctgggaggcgagggttgcagtgagccgagatcgtgccactacactccagcctgggcaacagatcgagactccgtctcaaacaaaccccaaaagccgtataaacgtctaccctcttcccttgcacacagcatttatctcaacattgtacatgcgtgcccaccaatttcatgttctgcggggcacagaacctgcagtcataatagctcttgtcagaaaccagccaatgaacagcaggagaatgaataaatactggggcatctgcacccatcggatcttctcacagcaatcagaactcacaaatgacaaccggcacaaccttaagccttgatctctcaaagctgaggttaatccaaacccaagacagtgcataccatgtggttccctacacgtgaaacaaaaaccagccaaactaatcctaggtgctgttacaacagagggtgcctttgtgggaggcaggatggggtagcaggaaaaggcacctggggatgaatccgctattctattcattgatttcagtgctgggcatgagtgcgttcagtttgtgaaagttcgtgaagatgtatgtgtctgattttttgcactttgctctatgtaagttctatggcaataacaattgaggaaaagagactgagatataaactcccgcttatggccaatctgtggcaaacttccaccccataaaacaacctcaggaataccgccttgtatactgggaatttgccgaaagagtagatttcagctactctttctacacacacgtacacaaaggtaattacatcaggagacggatatgttcctttgcttcattgtagtaatcatttcgctacatatacgtgcatcaaaacatcatgtatgccttaaatacatacaattaaaaacaacacaggctgggcgcagtggctcacgcctgtaatcccagcactttgggaggccaaggcgggtggatcacgaggtcaggagatcaagaccatcctggctaacacggtgaaaccctgtctttactaaaaatacaaaaaatagccgggtatggtggggggcacctgtagtcccagctacttgggaggctgaggcaggagaatggcgtgaacctgggaggtggagcttgcagtgagccgagatagcgccgctgcactccagcctgagcaacagagcgaaactctgtctcaaaaaacaaacaaacaatcaaacaaacaaaacccccacacacctgggtgcagtggctcgcgcctctaatcgcagcactttgagaggccgaggcaggtgaattggttgaggccaggagtttgagaccagcctggccaacatgatgaaaccctgttgctactaaaaatacaaaaattagccaggcatggtggtgggcacctgtaatcccagctacttgggaggctgaggtacatgaatcccttgaacctgggaggtggaggttgcagtgatctgagatcacgccactgcactccagctggggtgagagtgagaatttgtctcaaaacaaacaaacaaacacccaacacctaatagataaacagataaaaaaaatacaatttctgcagccttggtctctgcagtgactactcagttttttcttatgatttttcacaatcttttccttgtgtaaatcctcctggtttgatctttggggatgcagagaaatactggctattttgccaatttggacctgggactaggaagtttaagacacaattagggccgggtgcggtggctcacgcctgtaatcccagcactttgggaggccaaagcaggaggatcatgaggtcaggagctgagaccgtcctggctaacactgtgaaaccccgtctctactgaaaaatacaaaaaaaattagctgggcgtggtggtgggggcctgtagtcccagctactcgggaggctgaggcaggagaatggcgtgaacccaggagacagagcttgcagtgagctgagatcgcgccactgcactccagcctgggcgacagagcaagactccgtctcaaattaaaaaaaaaaaaaaaagacacaattagcttacagatttaatcctgtagggcaatttcaaggtactgatgtctccctcagcacctcagcaaactccattatatggatgcaaatgatcctgcctgggatccagacaccagtccttttaaattttactgtgaaattcaaatgagctgcaaaatctgagacccccgaaatgacagaaatgtcctcttcttgacttagaaatgaaggacttagagttcctttttttttttttttttttttttttgcgatagaatctggctctgtcacccaggctggagtgcagtggtgcgatctcagctcactgcaaattccgcctcccggattcaagcaattctcctgcctcagcctctcgagtcactgttattacaggtgcccaccaccaagcctagctaacttttgtattttttttttttttcgaaacagagtcttgctctgtcgtgcaggctggagtgcactggtgcgatcttggctcactgcaacctctgccccctgggttcaagcaattatcctgcctcagcctcctgagtagctgggattacaggcacctgccaccacgcccagctaatttttgtatttttagtagcgatgaggtttcaccatgttggccaggctggtcttaaactcctgacctcaagtgatccaaccacctcggcctcctaaagtgctaggattacaggcgtgagccaccacacccggcctaatttttgtatttttagtagagatggggtttcaccaagttggccaggctggtcacaaactcctgacctcaaatgatctgtccgcctcggcctcccagagtgctgggataacaggtgtaaaccaccctgccctggcaggacttggagttcttaaaaataataataacaataaattctgtttgggaggctgaggtgggcagatcacttgaggtcaggacaagaccagcctggccaacatgatgaaaccctgactctaccaagaatacaaaaattagctgggcgtggctgggcgtggtggctcatgcctgtcatcccagcactttgggaggctgaggcaggtggatcacctgaggtcgggagtttgagaccagcctggccgacgtggtgatacctcgtctctactaaaaaaaatacaaaaaatagccggatgtggtggcaggcgcctgtaatcccagctacttggaacttggaaggctgaggcaggagaactgcttgaacctggcaggtggaggttgcagtgagccgagatcacgtcattgcactccagcctgggcaacagagcaagactctgtctccaagaaaaaaaaattagctgggcgtggtgtcttgggcctgtaaacccagctacttgggaggctgaggcaggagaattgcttaaacccgggaggtggaggttgcagtgagccgagatcacgtcattgcactccagcctgggcaacagagggagactctaaataaataaataaataaataaatgatttctgatttcctggcccctcccgtaggcatccggagacactggtctggaaggcacccaggtgtgaaaacactcccaggtgtgttttctgcaaaccaaagttcaaaaccacagactccaaaccaaccagggaagtggtgtgtcatccttggctgtccttttggtctttaggggattgtaaaattcctatagcctaggctgcatccaacatcagtggaataaaaatgtgtaggggtgtgtgctaccattagtttttcaaactctccaggagattccaatgtacgttcaggttgggatacaaataaagtacatttcttcccatttaaactctcactggctacacgtgaatggtatgattgctccatagccatgtctgcacttggcattgctattttttcattttagccaaacagaagtgtatatgagtatctcatagtgatttttcatcagcgtttatctgaagctaaacagaatttgggcatgtgttcaggattgtattgaccatttatttattctctcttcaatagtgcctactgaagttttccactcattttgcacatcaatttttagtattttttttcatttgatggacatctttctagtctgtattctggcttgatgtactttactggatgcacatcatgcaaatatcttttccaatatgattttctaacacccatttctctctgcattttcattaataggagatctttctttttttttttttagatggagtctcactctgtcgcccaggctagagcgcggtatattgtgtctatatattggagtttgcaggggaggcatcggtgcattgaaattgccacaatgtgattaaatacgtaagctaattgtgtcttaaacttcctagccccaggtccaaattggtaaaatagccagcatctgtctgcctcctcaaagatcaaaccaggaagatttatacaatgaaaacatcatgaaaaataataggaaaaaactgagtagtcactgcatagaccaaggctgctgagactgtatttcttttttattaggtctgtttatttattaggtgtttttctttttgtttcttctctctttttttttttttttttttttttttttttttgagatggagtctcactctgtcgcccaggctggagtgtagtggcactatctcggctcactgcaacctttgcctcccaagttcacaccattctcctgcctcagcctcccgggtagctgggattacaggcatgcaccatcatgcccagttaattttgtatttttagtagagacggggtttctccatgttgaggctggtctcgaactcctgacctcaggtgatccgcccgactcggcctctcaaagtgctgggattacaggattgagccaccgcacccggccgacaattccattcttatttccgtagaatgctttcaaagatgtttgagagaatgggaggaaaaggaaacatatctaaaatgccgatattaactgtaaataccaccccgccacacacacggattaaattctttttctactgacattctgtgttggtaacaccatattggtttctgtataaagatttagaaatgcttcaaatccaatgggtggagacagggcgttccctatggattatccactgattgcattatcactccctctataaaagaggagctagatgcagaagccactgcattttccggcaagccaagggctgtctgtgcctcaggagtggggtcagcaggaggaactctacagctatgggagaacctgcgttcacctcttttccaagcctgcctgttctggtgagtatgggatccttattgactattgaccaaaataatgtccatttgtattcctttttctttctgtaaaacatcttcacagtttagcaagttgttctcaaaactagatgctatctcgtggaaacttataccctaggtgttaatatttgttgagtaatactcaagtaatattcaaaatattcaacaatattctaattttttgttcacggagctatctggggataatagccctgattttttaaaagtccaacaacatcactaagaaggaaaagaggtattacttggccttgcagtcttcaaattgtctctctctctggaaagttcttgaaccagaaattgcttggtccctttaaaaaaaaattttagttctctggttaaatatcatgattggttagtccttccctaaactcactgtcatgattcattgtagtgaatttctttcttttctgtttctctgtttctcctccctccatccctctctgtctctcccttcttcttcatcatggaacttaattatatctgataccctatcggaaatttgtttttagtgtgtttattatgtcttccttctcaccaagatgaaaatcaacagagtggtgatttctgcagtttacttctggatcaggggttctactgcacagcttggcacatcataagtgccctgtaactaaggagactaaataattttccctccaaaggggaacaccttgggtcgtgtaaggggtagtattaatcttaatgccaggacaacagaaatgaaatgagaaggacagaaatgaaggctttatgtttgtatctgaaacagctttatgagactagagtcttccaattgatttagagcaagaaaggatttcaaatcttaggaggggcttaatcatctttctcagtatgtcatcaaaagattctctcatggtgtaactctagttaattgagcttattagaaacagaaagcaacatggtgtttctgaggtttttcttcatgagcaggaggtgttcaggtgaaggtgggatctgggtgtggcagtgagtatttaaggtggcgagtgcaggatttctttggaaaccagagagtcaaggagctatgaaaatgacgttgtgtcctgaagcacagcagaaagagatacagagaagcgtgaggtcttggtgaacagggaagtctgggatcccggtgtcctgttggggatgggttaggaggcaccagcatctgtgtagctgacagtggcagggaagagaagagaggggtgtcctctgaggaggatgaggagggacaaggtctggaactgaccctgggtcatgaccttgagcatttagtccttgactcgcatcagcccgatgaggtcccaggacccagtgtcaatgcctggagctcctgccagcagcatcagggtcacacggagaaatgcagactctaggttccaccccagacttacttgggttcaggtccacatatctgacttcagcaaaccctgcaggtgctgaggatgtacactgccatttgagacacatttccccagaaagagaggctggtgggaagattccactgagctgagagaagccccccacagctgatcttctcctgtctccatttggttgaaatttcacattttcttttcttttgaaaggggaagctcaaaaggaacatgatgccctgggctttacagaagaaacgagaaatccacatggccaaggcccatcggagacgagctgcgaggtctgctctccccatgagactcaccagctgcatcttccggaggccggtgacaaggatcaggtctcatcctgacaaccaggtcagacgcagaaaaggggacgagcacctggagaagccgcagcaactctgcgcctaccggagactgcaggccctgcagccctgcagcagccaaggagaaggttcaagtccactgcatttggagagcgtcttaagtatccttgcaccggggacggccggtgaatctctggacagagctggtgctgagcgtgtgcgcagcccgcttgagcccacccctgggcggtttccagctgtggcaggggggccaaccccaggaatgggttgtcagctcccaccgcccctctctggccaattggtgactcctgcagatatccggagacaggccaggagggtgaagaaagccagggagagactggccaaggccttgcaggcagacaggctggccaggcgggcagaaatgctgacaggtggatgaagctcagtcttgggctttcggtccctttcttttaatgcccatcctcattcctactctgaattgtcacacttttcccttccccaccagttctttaataaaagtatttgaaaggcaacaggtgtaaggagtggatgtttttgtggtgagaaattgggttttatgggatgaggaaggagacctttacatgtcactgtacatctcagtttctgtttaccatgattttaattaattgtttttgtttgtttgtttgtttgtttgttttgagacggagtcttgctctgttgcccaggctggagtgcaatggcgcgctctcggctcactgcaacctccacctcccgggttcaagtgattctcctgcctcagcttcccgagtagctgggattacaggtgcccaccaccatgcccggatattttttgcatttttagtagagatggggtttcaccaggctggccaggctggtcttgaactgctgacctcagcaatctgcccacctcggccttccaaagtactgggattacaggcataagccaccttgcccggctgttaattagtttttgtattaaattctaatttaatctttggcctggcgctgtggcttatgcctgtagtcccagcactttgggaggcggagcagggcagatcgtctgaggtcaggagttcaggaccagcctggccaatatggcgaaaccccatctctactaaaaataactaatcaggtgtgggggcggatgcctgtaatcccagctactggagaggctgaggcaagagaatcggttgaaccaaggaggcagaggttgcagtgagccaaaatggtgccactgtactccagccttggtgaaactttatctcaaaacaaaaattctaatttaattttcaaatgaaatcctttaaaaatgaaattctgtaattttaaatgaaacgaatacattacattataatttgttaaaaatgtattacattttcatttttaaattgagttttcattgtttgaaattttcgatttaggggtacatgtgtacatgtttgttacatggatatatcgcttaacggtgggggttggttttgtagtttatgggttacccaaatactaaacatcgtacccagtagctaagttttcaacccatgggtaaattcaattaacctagcctgaaggattattcagtgtttagacattacattttctccctataatatacattctcaaggcgaagttggtacgtatcccaagattttttttttaatgaaacatttttaccccatttactctgatgtggttatcagacattttgtgcctgtatcaaaatatctcacgtaccacataaatatatacacatactacgtccctgcccgctgtttgactttgagtttccttacctctttctctttatcgttgatcaaaacatggaatggaatacttcatggtaattattttatgcatctcgggttaggtggaaactactggttgttttcactctagcagagttagggtggcaggaagtgcctatcagcagatgctactgcacaccagcccgggcgacagagcaagactctgtgtctaaaaataaatatataatttatatataattataaatacattatatataatttatatataattataaatacattatatataatttctatataattataaatacattacacataatgtatacataattataaatacattatgtataatacaattatatactatataattatattatatactataatatatttcttatataattatattataatataatttatatgttatataattatattttatattataatataatttatatgctatataattatattatatattataatataatttatatgttatataattatattatatataatataatttatatgttatataattatattatatatataatataatttatatgttatataattatattatatatataatataatttatatgttatataattatattatatatataatataatttatatgttatataattatattatatattataatataatttatatattatatacttacatatattatatattaaaatataatttatatattatgtaattatatattatatattataattatatttatatatcatatttatataattatataatataattgtataatatatactatataggtatattatataattatatataattatatatattataattatataatataatatatattatattatataatatataattatacataactgtattaaatataataatatataattatatataatatatataatatactataatataattatatataattatattatatattatgtataatatataatttatattatatagtatatataatatatataatatataatatgtaatatataatatataatatatataatatgtaatatataatatataatatatataatataatataattatataaaattatatcatattgtattataattatatattatatataatatagttatgtataattatatattatataatataatatatattatattatataattaatatatataattatatataataattagatacctatatattatataattatattatataattaataaatatattacatataattatataaatataatatataaatataattataatacataatatatataattatataatatataaattatattttaatatatataattatataatatacaaattataatttaatatataatatgtataattatatactatataaattatattataatttataatataattatataacatataaattatattataatataaaatataattatataacatataaattatattataatatataatataattatataacatataaattgtattataatatataatataattatataacatataaattatattataatataaaatataattatataacatataaattatattataatataattatataagaaatatattacagtatataatataattatatagtatataattttattatacataatgtatttataattatgtataaattatatataatgtatttataattatatataaattatatatttatttttagacacagagtcttgctctgtcgcccgggctggtgtgcagtagcatctgctgatgggcacttcctgccaccctaactctgctagagtgaaaacaaccagtagtttccacctaacccgagatgcataaaataattaccatgaagtattccattccatgtttcgatcaatgataaagacgtaaggaaactcaaagtcaaacagcgggcagggacgtagtatgtgtatatatttatgtggtacgtgagatattttgatacaggcacaaaatgtctgataaccacatcagagttaatggggtaaaaatgtttcattaaaaaaaaaatcttgggatacgtaccaacttcgccttgagaatgtatactatagggagaaaatgtaatgtctaaacactgaataatccttcaggctaggttaattgagtttacccatgggttgaaaacttagctactgggtacgatattcagtatttgggtaacccataaactacaaaaccaacccccaccgttaagcgatatatccatgtaacaaacatgtacatgttcccctaattcgaaaatttcaaacaatgaaaactcaatttaaaaatgaaaatgtaatacatttttaacaaattataatgtaatgtattcgtttcatttaaaattacagaatttcatttcatttttaaaggatttcatttgaaaattaaattggaatttttgttttgagacaaagtttcaccaaggctggagtacagtggcaccattttggctcactgcaacctctgcctccttggttcaaccgattctcttgcctcagcctctccagtagctgggattacaggcatccgcccccacacctgattagttatttttagtagagatggggtttcgccatattggccaggctggtcctgaactcctgacctcagacgatctgccctgctccgcctcccaaagtgctgggactacaggcataagccacagcgccaggccaaagattaaattagaatttaatacaaaaactaattaacggccaggcaacgtggcttatgcctgtaatcccagtactttggaaggccgaggtgggcagattgctgaggtcagcagttcaagaccagcctggccagcatggtgaaaccccatctcaactaaaaatacaaaaaatatccgggcatggtggtgggcacctgtaatcccagctactcgggacgctgaggcaggagaatcacttgaacccgggaggtggaggttgcagtgagccgagatcgcgccattgcactccagcctgggcaacagagcaagactccgtctcaaaacaaacaaacaaacaaaaaaaacaattaattaaaatcatggtaaacagaaactgagatgtacagtgacatgtaaaggtctccttcctcatcccataaaacccaatttctcaccacaaaaccatccactccttacacctgttgcctttcaaatacttttattaaagaactggtggggaagggaaaagtgtgacaattcagagtaggaatgaggatgggcattaaaagaaagggaccgaaagcccaggactgcgcttcatctacatgtcagcatttctgcctgcctggccagcctgtctgcctgcaaggccttggccagtctctccctggctttcttcaccctcctggcctgtctccggatatctgcaggagtcaccaattggccagagaggggcggtgggagctgacaacccattcctggggttggcccccctgccacagctggaaaccgcccaggggtgggctcaagcgggctgcgcacacgctcagcaccagccctgtccagagattcaccggccgtccccggtgcaaggatacttaagacgctctccaaatgcagtggacttgaaccttctccttggctgctgcagggctgcagggcctgcagtctccggtaggcgcagagttgctgcggcttctccaggtgctcgtccccttttctgcgtctgacctggttgtcaggatgagacctgatccttgtcaccggcctccggaagatgcagctggtgagtctcatggggagagcagacctcgcagctcgtctccgatgggccttggccatgtggatttctcgtttcttctgtaaagcccagggcatcatgtttcttttgagcttcccctttcaaaagaaaagaaaagaaaatgtgaaatttcaaccaattggagacaggagaagatcagctgtggggggcttctctcagctcagtggaatcttcccaccagcctctctttctggggaaatgtgtctcaaatggcagtgtacatcctcagcccctgcagggcttgctaaagtcagatatgtggacctgaacccaagtaagtctggggtggaccctagagtctgcatttctccgtgtgaccctgatgctgctggcaggagctccaggcattgacactgggtcctgggacctcatcgggctgatgcgagtcaaggactaaatgctcaaggtcatgacccagggtcagttccagaccttgtccctcctcatcctcctcagaggacacccctctcttctcttccctgccactgtcagctacacagatgctggtggtgcctcctaacccatccccaacaggacaccgggatcccagacttccctgttcaccaagacctcacgcttctctgtatctctttctgctgtgcttcaggacacaacgtcattttcatagctccttgactctctggtttccaaagaaatcctgcactcgccaccttaaatactcactgccacacccagatcccaccttcacctgaacacctcctgctcatgaagaaaaacctcagaaacaccatgttgctttctgtttctaataagctcaattaactagaggtataccatgagagaatcttttgatgacatactgagaaagatgatcaagcgcctcctaagatttgacgtcctttcttgctctaactcaattggaagactctagtctcataaagctgtttcccccacaaacctcatcagtgcactttccattttaaagcctttgtttctgtcctcctcatttcatttttcgttgtcctggcataaagattaatactaccccttacagtacccctggcataaagattaatactgacccaagatgttcccctttggagggaaaattatttagtccccttagttacggggcacttatgatgtgccaagctgtgcagtagaacccctgatccagaagtaaacttcataaatcaccactctgttgattttcatcttggtgagaaggaagacataataaacgcactaaaaacaaatttctggtggaatatcagatataagtaagttccatgatgaagaagaagggagtgacagagagggatggaaggaggagaaacagagaaacagaaaagaaattcactacaatgaatcgtgacagtgagtttagggaataagcaactcatcatgaaattttaccagagaactaattttttttgttttttgtttttttaaaaaaacggaccaagcaatttctggttcaggagctttccagagaaggagacaatttgaagactgcaaggccaaatcatacttcttccctttcctagtgatgttggatttttaaaaaaaaattcaaagctattatccccatacagtttcatgggcaaaaatgagaatactttgaacattattcaacagatattaccacctgaggtataactttccacaacatccagttttaagaacaacccactgctaactgtaaagctgtcttacagaaggaaaaaggacacatatggacattcctgtaatcaataaatatcccgtactcaccagaacaggtgggctcggaaaagaggtgaacgcaggctctcccatagccgtagagtttctcttgctgaccccactcttgagatgcagacaacccttggcttgccggaaaatgcagtgacttctgcatctggttcccctttttatagagaaagcgagtgataatgcaatcagtggataatccacagggaacaccctgtctccgcccattggatttgaggcatttctaaatctttatacagaaaccaatgtggtgttacctacacagagtgttagtagagaaagaattgaatacgtgtgtatgtgtgtgtggcggggtggtatttacagttaatatcagcattttagatatgtttccctttttctcccagttttccaaacatctttgaatactttctatagaaataggaatggaattgtctatgtacataaatgttcacgtaatatttgatttaataacaacaactaaagaccatttaaatgttctttaagaaaagaaagcccaaaacttttattcacaatcctatagaatatatcacacagttgttgcaaagaaattactactttggccgggagaggtggcttacgcctataatcccagcactttgggagaccaaggcaggtagatcacctgaggtcaagagttcgagaccagcctggccaacatggtgaaaccccatttctactaaaaatacaaaacttaccctggtgtggtggcatgcacctgtaatcccagctactcgggaggctgaggcaggagaatcgcttgaacctgggagggagaggttgcggtgagccgagatcgcaccactgcagctcagcatgggcgacagagtgagactccatctcaaaaaaaaaaaaaaaaaaaagttctatttcgtgcatttacatttaatataattaccagtaaatttgaaattgtttcaatcatctcatttttcctaggttttgacttaactgactcacgttccttttgcctttacttgactgactttgaattaaatatgtttattattttattgttatctccatgaacttgctagttacagccatacaaatctgtgtagttatgctaataattaaatcatatactctgatacaattaattactttaacccctcccacaaaatgctaatactttagaacacttttaattctctttttagctgtttctgacttttgtattaccattctcatgcatattaattctacacatattttactctccaggagacatttctagtattgcttcataaagcaatatgcactaatatttacctacagcttatcttgtgcattcatctttgttcctttctgcatttctagcattcaatctgggattatttccctgtggacttgagaattcattctagtatttttcttctaattcaatgctgctaacaactaattgttttcctttacacttttatttaggcatctttatttgggggcaatattgctgtcaggtacgggtgtctggtttgacaaatttctttcagcatattagaaatggtgccccactgatgtctatctcattttacctgtgttgagatgtcagctgtcaggcttttccttgcttctttggtttccacattctctaaactctttctcgttgtggttggtttgtaggccacagtgtagctcattattgcttcctgtgtatttcctttgcctagagggtgtggagtcaattgcatctgtgggttgatgtctttcattggtttggaaggtgcatatgtatccttcacttctgatatccattcttgtccaagttctctctactcttcttttaatcacatcccacttgtctctgaagtttccaatgttgttcatgctttggtgggaatatttgctcttgaaccttgttccactttgctaatctaccttttttctaggttcagtctcattttaattttccttccttccttccttccttccttccttccttccttccttcctgtcttccttccttcctgtcttcctttcttttctctcttttctttcgagatggggtctcactctgtcacccaggctggagagcagtggcgggatctcagctcactgcaacctctgcctcccgggttcaatgattctcctgcttcagcctcccaagtagctgggactacaggcacatgccaccacacccagcttatttttgtattttttgtcgagacggggtttcaccatgttggccagggtggtctcgaactactgacctcaagtgattcacctgccttggcctctcaaagtgctaggattacaggcgtgagccaccgtgcctggcctaatttcttatactcttagtttcagttctaagcataaaacacagtaaatagctttaattaaaaactaggtagaagaacagcttcacagtcaatgaggagataatctgccttcttgatacaatgaaactctaaatagaaaggagaaaattcaaatttgaaccatattaagatacattaagagcaactattcattcaaatacatcagtaagagagaaagcgtggaaaaccggagtgggggaagaggtttggatcctgtacccccaggaaagtacatcaagccagagtatatatataaaaaaaatcttaatatttaaaaaaaagagaataatgtcaaacaaacagagaaaaataatgaaaacacacttgaaactgggtgaaaaacttgaatggatcctacacaaaagaatataaacaagtgaccgtaaaaaattattattatcattattattattataaattttcaggtggagtcttgttctgtcacccaggctggagtgcagtggcacgatcttggctcgccgcaactctgccttctgggttcaagcgagtctcctgcctcagcctcctgagtaggtgggattacaggctcccaccaccacgtccagctaatttttgtattttgagtagaaacagggttttaccgtgttgcccaggctggtcttgaactcctgacctcaagtgatccacctgccttggcctcccaaattgctgagattacaggcatgagctaccgcgcccggcctaaatgaccagcaaaatttgagcaaatgtttaacccttttagcttcagggaaatgctaaaaaaataaaaattacaatgagatactattatacagatatctatacattatattataatatataattatattataatattatataatataattatatataaattatatataatataattatataatatataaattatatataatatataatagaattatataatatataattatattctatatagaatataattatatataattatattctatatagaatataattatatataattatattctatatacaatataaaatataattataatatataatataattataatacataatataattatatattatatacttatagataatatataataatataattatataatatattattatataattatatatataatataattaatatataattatatattatataattaaatataattatattataaattataatataattatattatatataattatatatataattatattatatataattatatatataattatattaaatataattatatattataatatattatatataattatatatataatatattatatataattatatatataatatattatatattataatatattatatataattatattatagattataatccataattatatatattataatatatataattatatgatatattataatatattatattatatataattatatattataaataatatattatattatttataatatataatattatattataatatataattatatatattataatatataattatatatattataatatattatatataattatattatagattataattaaatatatttaaattatacattataatataattaaatatatttaattatattatacattataatataattaaatatatttaattatattataatgtataatacaattatataatataaattatattataatatataattatatattttacatttcatatataatacaatatattacatataatgatagttatatataatacattatatataaatataattatatacaatagaatatgttatatataattataattatatatattatagataataaatatattcattatgtatattatattttttatattatatatttactattattggaattataatttattttatgtaattgtatattatatattataattatatattatatgtataattacaatatataatatataaattatatattatatatgtagattacatgttatatataatatatgtaaattatatattatatttatatattatatgtaaattatatttttttcatatattataatatatgtaaattgtatattatatttatatattataatatatgtgaattgtatatatctatatattataatatatgtaaattgtatattatatttatatattataatatatgtaaattatatattatatgtgtaaattatatatatttatatgtataaattatatattatatttatatagtataatatgtgtaaattatatattatgcaagtatatatagcttatatatagtataattatacaattctatataatgtaattatatattaaatatatgtaatttatataatatataatgtgtatttaatttatattatataattacattatgtgtttatatatattattatagagagagataaacaagaatctccatgtgctccccaaactgtctctgggtttccatctgtgggatgcctttcccagtgtcctaaggatcttggagagctcccttctgtggctctctgcagggagacagactatccctaaatacaactgccagacacagaacaaaactgttgccgtcatgccaggtaccacgtcagtatcttcaaccaagattggagctcttctggggtgctacagaagcccacgggtaaggagtttgggaattctacagagaaatatttgggtctcccctaatgccactctcttacatctcatcgaatggaaaggtggacactgagcttacatatccatgagagttataacagagttataaacagaccttagggaattccctgtatcatgaaatgatcatgatggtgatgatgctgatgattattattattattttggaaagaaggtctcactctgtcaaccaggttggagtgcagtggtacaatcacggctcactgatgtctcgacctcctggctcaggtgatcctcccgcctcagcctcataaggaactgggactacagatgcatgccaccacacctagctaattttgttgttgttgagaaggggtctcacaatgttgcccaggctggagtgcagtggcatgtggtatgatcatggctcactgtagtcttaacctcctgagctcaggtgatcttcctgcctcagcctcccaaggaactgtgactacaggcgcatgccaccacacctggctaatttttgtattttgggtttttttggtagagatggggtctcactatgttgcccagcctggcctcaaactgttggccccaagtgatcctcccgccctggcctcccaaactgctgagattacatgtgtgtgcccagtcaacattattaacaatagcaaggatgggaataaaacagaacgtgcagtggatgctgtgagtctcgacccagagtcctgtccatggccaatgcctccatcccccagctgctgagaatactgactgctgacagttcatagctgtgtgccttactggaaacatcaggattacaggacgccaggaattccgcaacacagagaagtaccccatcctagaatatgactttctcaggggcatccagagaccaggctcacacctataatcccagcaatttgggaggccaaggcgggcagatcacctgaagtcgggagtttgagaccagcctgaccaacatagagaaatcccgtctctactaaaaatacaaaattagcgggcgtggtggtgcaggcctgtaatcccagctacttgggaggctgaggcaggagaatcgcttgaacccggaaggcggaggttgtggtgagctgagacggcgccattacaaacaaacaaaaaaccaaaacaaaacaaaaaaaccagagaccaatgactgtcagatgctagagatacaaagagaaaatttactaaagaatttacttctgcctttcacaccaaaagagagaaatctctggtttccaacacttcctcaagacagtgaaccctttccaatacacagaagacttttactttagtaaattctggattgaccttttttttttttttcctacttgctggatcgcaaggtggaagaattgtggagcttgcccatcaaattctgccactgcactccagcctgggtgacagaggagacttggtctcaaaaataaaaataaataataaatgtatacattttgatgggtttggacatatgcacacacttatggtgccaccaccacaatcgaggtactaaatatattcattcatgtcatgcccttttcaaagtacaaggaccaggtcaggagcagtggtggctcatgcctgtaatcccagcactttgggaggccaaggcaggaagattgcttgaggccaggagttcaaaaccagcctaggcaaaatagcaagagcctgtctccataaaaaagaaaagaaaaagaaaaaaatgaaaaattagctgggcatggtggcatacacctgtaatctcacctactcaggaggtcgaggtgagcagatcacttgaggctaggagttcaagaccagctggataacatagcaagaccctatgtctacaaaaatgttttaaattagccagatgtggtggtgtgcacctgtagtcctagctcttcaggaggctgaggcagaaggatcacttgagcccagaaattcgaggctacagtgagccatgatggagccactgcactccagcctgagcagcagagtgagagatcctgtctcaaaaatatatatattattactgttagtaaaattagaaattagatggtaaattaaactttctaacattaatttttataggttataaatttttataggtatgcatccatctctgtctagatattaaatctgatttattcggctgggtccactggctcacgcctgtaatcccagcactttgggaggccgacgcaggtggatcacctgaggtcagaagttcaagaccaacctgagcaacatggtaaaaccctgcctctttttaaaaaattaaaaaaaaaaaaagactacataatatgactatgtgttagtagatgagtgattaaataaattttggtacagcaattaattggaatatcataccacttatttaagacttggctaaacactcatatctacctggaaaaaagtccatggtctgttaattttttaaagtaatctccagaataattagtatatagtattatagtatttttaaaaactattttaaaactctcaatataggaatatatattgtgataaaatgctttttctagtatttatgtagtaaattatattattacatgtcttaagtttaattttttgtagagcaaggactatagtaatggtcacctcaaagtcaaattagagaagggaaagggagttttatcttattttttactttaatttttttttttgagatggagtttcactcttgttgcccagtctggagtgcaatggcgtgatctcggctcactgcaacctctgcctcccaggttcaagcaattctcctgcctgagcctcccgagtagctgagattacaggcaccacacccggctaatttgttttgtaattttagtagagacagggtttcatcatgttggccaggctggtttcgagctcctgacctcaagtgatccacccacctctgcctcccaaagtgctgtgattacaggcatgagccaccacacccgggaaagggagttttgaattgtgttttacatactccatatttgtgagaatgagcatatattattttattaattttaaaaatctaattaaaaacttttaaataaaacaacattaagaactatgaaatgtaggggccaaccccacagggtcagtgggtttttctccctgtgtgtggagacaagagattgtagaaataaagacaaagagataaaagaaaagacagctgggactgggggaccactaccaccaagatgcagagactggtagaggccctgaatgccaggctgtgctgatatttattggatataagaaaaaggagcagggtaaggagtgtgagccatctccaatgataggtaaggtcacgtgggtcacgtgtccactggacagggggcccttccctgcctggcagccgaggcagagagagagagggagagagagagacagtttacgccattatttctgcatatcggagacttttagtactttcactaattttgccactgctatctagaaggcagagccaggtgtacaggatggaacatgaaagaggaccaggagtgtgaccactgaagcacagcatcacagggagaccgttaggcctccagataactgcaggcgagcctgattgatgtcaggccctccacaagaggtggaggagtagagtcttctctaaactcccctggggaaagggagactcccttgccccgtctgctaagtagcgggtgttcttccttgatactgacactaccgctagaccaaggtccgcttggcaacaggcgtcttcccagccgctggcgttaccgctagaccaaggaggcctctagtggccctgtccgggtataacagaaggctcgcactcgtcttctggtcacttcttactatgtcccctcagctcctatctctgtatggcctggtttttcctaggttatgattgtagagttaggattattataatattggaataaagagtaattgctacaaactaatgattaatgctattcacatataatcatatctatgatctgtatctagtataactattcttattttatatattttattatactggaacagctcatgccctcggtctcttgcctcggcacctggatggcttgttgcccacaatgaaatatgaaaaatttagcacacagatcaccatatgtttcctcatctataaatagtgatagatagtaacaccttccttataggtctctgtgaaaatatttagggataatgtatgtaaaactgtttattaccaggcaggttggaaagtaatgtcccattcatttgtccactaggatggccatagggtttttggttttttttccttttaattcttgaattccagagtcttcaaatacattccattgttgtaaagtgaatcatattcacattttttccctagagtttagcgattccttttgcatacaaattcaggctgtatgtgttcacacatagatctcaaataacatcttaattttcacaacgaaaagctcccttcctcaccctgtagcctggctcctagaagcaacttttttttttttctgatagtaattacatatttgtaagttaggtatttatactgctttttcatttatcagctttaaactatattgaattactttcttctccgaaacaattagcacataactcttacgtactgtaaaactaattttcctcaccaaacataatcatttaaggaatctggataaatcaaaattcaatgtttatcattttatgacatcaatatttaccatttgtagcatctaaaccttagccagacatgtaacaagtagtatgtcattaataattttttctcattttttcttttgatctcttaaattttaaaatttccttttttatttcttcctatgaatccaacacctattttctccaccagaaatgtagttctcttttcagtagatccagatgtgcactagacaattaatcagctttggctttcacttggagacatccctccctagtcctccctcccctcgtccccctctggatgggagaaatatgcatacatgatcccatttttgaaagaaattaggaagctcaaaatcacacaaaaaggctgggtgtggtgtggctcacacctgtaatctcagcactttgggaggccgaagtggggtatgacttgaggccatgagttctagaccatcctgggcaacacagacctcctctctacaaacaaatacaaaaatagtcaggcttggtagtgtgggaggcccgggtggaaggatggcttgagctcaggaggtcgaggctgcagtgagctatgattgcaccactgcactccagcctgggccacagagtgagaccctgtctcaaaacaaacaaacgaaaagccacacacacacacacacacacacacgccctaaatgtgtggctatatcattttaacaggcggtgaatgtggagaaatgactgaagaaaactttaaagagttcattttgcatcctgctacctgaacagttttaaaatccacaaaaagccctacacccaaaaactgacctccaccaagtcttgtcctctcagcctactagctcaaccccattccatgccccaccactgccttatcttgtccacatactcgcccaccaaacctggtattaacccacagcaagatccgcccatcaaacctaatgcccgcccacaacctcgccccggaacttagtctctgtcctgacagccccgcccccatgcctggtaccgcccacggtcccgccccagaacttctccccacccccggagctgatctccacccacactcagccctgcctccaggcctggtaccgcccacagccccgctccagagttggtccccgcccccggaactggtccccgtcaacactcaggcccgcctccaggcctggtaccgcccacagccccgctcaagagctagttccgcccccaaccctgccacagacccgcgccaggacgaccctgcctccgcggctgtccctagccagggcccaacctggttctattaataactaagcaaactagaacacctcagccggaggctggggtgcgcggctgctgcacctgcagcctgaacccgggggtcctgacacgccgcattttgggctgggaccagctggagccggaagcggaggtgcagtgtggctagccggagaccggaagcggaagcgcgcttgtgtcttgtgagaagagccgcgcttgcagcgtctgggagaatctttcggtctccgcgagaggtgcttcattccgtgagtccgagtccagagaggggccccagccgcgggcctgcgtccctcccgggagccgggtttccgcccctgaggcctcgggctgtgcgctcagttaagcccgaagctgctgtttcctccggtgtccgggccccgcgcccctgtcatcctcactctgtcgtcctcaccctgtcgccctcacccggggcgattctgcgccccaggggacttttggctatagttggagacggtttgggatgtcacaaaatggagggtaggagggactgtgctactactgtaatctagagggtggaggccagggatgctagcagctcagcatcctgcagcgcgtaaagcagccgccgccagcaaagactcatccagccccaaatgtcattagtgcccaggttgggaaaccctgctggagggcattaaaatctctgcagtcctgaatacactgtagaaattatttagaattcagccgagtccacttataaggcctaaagtgacgaatttaaagcatctggagtcaccatacaatctccagccaaatgagttaagcaagtcagatgaaaacagctttaagcttcttgtcccattttagggaccagatggctggataggaatctggtgaattcaggcacagccagtagcctgggttcttattctttaaatcaattttttttaagtgaatggggtggtctttctatgcaacaactgtattagtctcagtaaatacattttactatacgtacatattactccctacaaaaggcctcataagcgatttttgtgccctttttatttagacgaaaaaagtataattcaagctcagatttgtgttgaaaccagcctcaagtttcacctatcctcactgatccgtggacttctgtatgatcaggtaggtaccgtgtagaacctgcaagttgcaagactccactgtgtagaaaacctgtgaatggatttttcctgtgttcaggttgtaaacacaaggactcactaacagtgagggtatttttttttttttttttgagacagagtctcactccgttgcccagcctggagtgcagtggtgcgatctcagctcattgcaacatctgcctcccaggttcaagcagttctcctgcctcagcctcccaagtagctggaatgacaagggtgcaccaccacgcccagctaatttttgtatttttagtaaagatggggtgttgccatgttggccaggctggtctcgaactcctgacttcaggtgatccacccacctcggcctcctaaagtgctgggattacaggtgtgagccacgagtgagggtatcttaaaaattatttgtttgatgccttatattcaagagaaggatactaaggggtgtgtgataatgtgtgtcaaaataagtcagtaaatacagctatatgcaaatcagtacacaaaacatgtaaacactatttaaaagtttttttttcaaccttccaagacatctcaatttttcttttatttttttcttttcctaacaggcctgccagcctgtagacttatgctgtataataaggtagctgctggtccatgcggttgttttaatttaaatgtagaccaattaagattccataaaattttaaattcagcttctcagtcgcactaaccacatttcaagtgcttgacagcgacatgtggttaatgcccctattgaacagcaaagattaagatcatttccatcatcccagaaagccctgctgggcggcattgttctagtctcttcccatctgtccattgcaatgaagccagaacggctattgtaaaagataatttgtggccaggagcagtggctcaagcctgtctgtaatcccagaactttgggaggccgaggtaggtggatcacctgaggtcaggagttcaagaccagcctggccaacagggtgaaaccccgtctgtactaaaaatatataaattagctgggtgtggtgactctcttgagcctgggaggcggagactgcagtgagccaagatggcaccgctgcacttcagcctgggcaacagagcaagactgcatctcaaaaaaaaaaaaaaaaaaaaaaaaagctgggcatggtggctcacgcctgtaatcccagcacttcgggaggccaaggcaggcagatcacgaggtcaggagatcgagaccatcctggctaacgtggtgaaaccccgtctgtactaaaaatacaaaaaaaaaaaaaaagattacccgggcgtggtggcaggcgcctgtagtcccagctactcgggaggctgaggcaagggaatggcataaacccgggaggtggagcttgcagtgagccgagatcatgccagtgcactccagcctgggtgacagagcgagactccgtctcaaaaaaaaaaaaaaaaaaaaaaatacagccaggcacagtggctcacacctgtaatcccaccactttgggaggctgaggtgggcagatcgcctgaggtcaggagttcgagaccagcctggccaacatggcaaaacactgtctctactaaaaatacaaaaattagctgggcatggtggtgggcacctatgatcccagctactcgggaggctgaggcagacagaattgcttgaacccaggaggcggaggttgcagtgagccgagatctcaccattgtactccagcctgggtgacagagcaagactgtctcaaaataaatacataaagataaatttgctttagtcactcgcctgcctgaaaagcctttgctggctctccactgcctctcatgttcaaactcctcaccactctttataatacctttcaaaatacaacctttcccgtgcactctggccccttatttgtccacatgctccaaactgtgaacttggcttcctaagcagcttgctttcctgcctctgcacgtgcactttccactgagcaagaccctacctcgactctcaagactcaattcaaatgttcttagtgtttttccttccaaggcttcccagtccccttcttcccagatcctgggttggatgccatgtgcccctctgccatatcacatatcactctgaaatgcagcagcaggtctgtgtgtgtgtcctgctcccagaaagccagttcttagatgacagggatcttcctcccctccatctccagcacccagctgggggcaggtatcaataaaacgtgaatgaggggtcaacgtcgggaccctagggctgcagaagggatttgagaggaataactgggtgaggaaatgctatgcctggtttggacttgggagggaagagggggcgacccaccaggggctcacctgtgcagagttctcttctctaccgtttgtgcaacacagctgctggaagagcccactcacaaacaagtataaatacatggaactgtagagaaataatacagatatttgtttttttggttttttttgtttttttttttttgagatggagtcttactctcacccaggctagagtgcagtggcatgatctggtctcactgcaacctctgcctcctgggttcaagcgattctcctgcctcatcctcccaagtagctgggattacaggcacccaccaccatgcccagctaattttttaaatatatttttagtagagacaaggtttcaccaacttggccaggctgttcttgaactgctgacctcaggtgatccgcccacctcggcctcccaaagtgctgggattgcaggcgtgagccactgtgcctggctataatacagattttcttgcatgtcataatactaaaactttcaggcttttacatataagtacaaatatataaacttttcacatgtatatgtgaattttgggggttctgttaacaccacagagaccagatgtcagagacacttggcagctatattaactggagggtgggggctgtgaggctgcaggcaggaatgggaaagagcctcccatctctgcttggctccaagtaccagcgaacaactggcctgtggggaatggctctccattcagtcctctcccaatccttctctccccggagattgggggtatgggggtcacccaggataaattccctgggcaagagatctagaaggaagccagggcctgaatgctacatctcaatacaaattcctagagagactgagtggccctgccttccatgaatagccagcaccgtccaccctctacagctctgttttgtctacctggcccaaactcttacaagtctctaactgcagacagcgcctgcccccgcccccaccaacccctcccacacacacccttgaccactttttttttttttttccaaatggagtgttgctctgttgcccaggctggagtgcaatggtgcaatcccggctcactacaagctctgcctcccaggttcacgccattctcctgcctcagcctcccaaatagctgggattccaggtgtgtgccatcacgcccagctaattttttatttttatttttttagtagagatggggtttcaccatgttagccaggatcgtctcgatctcctgacctcgtgatccgcccgcctcggcctcccaaagtgctgggattatagacaggagccaccgcgcctggccagccgctttcatctttgtgtgtatatacacacacacacacacacacacacacagcccttcttttctcataaaaaaggaaacattccatatatgctatttggtacttttttttccccttaaatttactgacgataataacctctattgatatctagagatcttctctcttttttttttaatgggtgcactgtaatgccacagtgaataatcttacacaacttttacatttgtgtatcttacagatcgattcttagaagttgcaggaacctagggtctctgatagaaaatggctggagctctgctgggctggcatgagagtggggagtggggaggaggaaatcaactgaaatgaggggtagtgacatctgagctgggtgaggtggaaaccaggaggagggggtggtcaaggcagatcacaggctggagagggggtgaccgaggcagggcacgggctggaggggggtgaccgaggcagggcacggactggagggggggtgtgaccgaggcagggcacgggctggagagggggtgaccgaggcagggcacgggcaggagggggggtgaccgaggcagggcacgggcaggagacggggtgaccgaggcagggcacgggcaggagacggggtgaccgacgcagggcacgggctggagggggtgaccgaggcagagtgttccccccatttcttccagggtgctgtcctgagagcgctgcgggataaaggaggagcgtcctgcttcccggctgccctgttgctgtcggagtcacaggatggcggctgtcgtcctgcccccaactgccggtgagtcatggggtcctggcagttctcagagtccaggcttgaaaggtcctgacccacagcatgggatgggagggggttgggcagagcaggtgaggcaggagtggagccccaggggcccagaggtcctccgtgtctgatcgggcggctcttgggacttgggacttaggcatttgggtgtctgtggatgtcacctgtgtggtgaatgtgctggagcttttgaattctcccttcagttctttctgtgaacctgataaaaacacagtgacgccctcggaacttcagtttcctcatctgtgaagtgggaataatcccttccccaagtgcagtcagaccttaagccctgtttcctggcgtggatgcggcagggccatgctctggtttccttggattgctgtgggttggtgtttgcttggagtagaggtggatgctttgtgggtgactgtgtatgcatggggacctggtcgatcgcaggcaggtggggaagcctccagatgtgtgagtggacacagggcaggtgtggattcctggtactcatttctcctcctccagctctgtcttccctgttcccagcctctcagcgagaaggacacacagagggcggagagctggttaatgagctcctgaaaagctggctaaaggtgagtcggatgttcctttttccaaatcatgattccttcagccagaaggttggacttgatgcctttcagtggcctggagccccacggccaaacttgttcctcaggcatcccagggtctctgagtgagggctgcccagaaaatgtcagtgtgtgtcaacgtttactgcaggttcagagctccctccagagtccctgagtacatcatgtgctcctgagagttttaagggaaagccaagtaaagacgtgatgatgttctaaacccaagcaattaataaaggccatacggaaatcattcattcacttaccaagtatttctctgatttctgccatgtcacgggcccatgatcccctggagactgagggaaataagatcataggagctcccagtttgagtgagaaaagacagctgctctgcggtactgtgcgctggacctgggagtagcctaaggagacaagcattgagggctgagctcagaagccagggagaagagctcagaacctcaggagaggagctcagaatccccccacatctcgtgctcaggtttccccagccctggctctgttctcctggcccctcttcctgtgcacattggtgggggtggtccttggctaagccgtgatgtttgcaatgctttagggcttggtgacctttgaggatgtggccgtggagttcacccaggaggagtgggcattgctggaccctgcccaaaggacactgtacagggacgtgatgctggagaactgcaggaacctggcctcactgggtaagcctaatgtcattcctgcatttatttaatgactcaggaagtcagtcttttttttctttttttaaattgaggtaacacaggacacaaaagtcaccatttaaactattttaaagtgtccaatttggtggcttttcgtaggttcacagtgtagtacagccatcaccactaattccagaacatagttgtcacaccaaaaataagccccatagtcatgaaatggtctctccccagttctccctcctgaacatcttggcaggcactaatctttccgtctctatagatgtgtctcttctttttgagggggttgtttttagacagtgtctccctccgtcacccaggctatagtgcagtggcgtgatcctgagtagctgggaccacaggtgcggaccaccacgcccagctaatttgtttattttttgtagagacagggtcttgctatgttgccctggctggtctcaaactcttgggctcaggtgatcctcctgccttagcttcccaaagtgctgggattacagatgtgagctaccattcctggcccaattcttgacattttatataaatgaaatcatacaaaatgtggtcttttgtgtctcactttttgcttagcataatgttttctttctttttttttttttttttttttgagatggagtttcactctgttacccaggctggagtgcagtggtgtgatctcagcttactgcagcctccaccttccaggttcaatctgttctcctgcctcagcctcctcaacagctgggactaaaggcatgcgccaccacactcagcaaatttttgtgtttttaatagagatggggtttcaccatgttggccaggctggtcttgaactcctggcctcaagtgatccacccacctcagcctcccaaattgctgggattacagggatgagccaccacgcctggccgatgttttcaaagtacagctgtgttgtagcacatagcagaacttcattctttttatggttgaatattattccgttatgtgtatataccactttttatatatcatttcatcagctgatggaaatttagcctgttctcatcttttggctattgtgggtagtgctgctatgatcattcatatacaagattttgcttgagcacctgttttctcttgggtatatacctaggagtggaacttctgtgtcctgtggtaattctgtgtttaatgtgttgaggaatgtccaaacttttctacaactgctacaccattttacattcctaccagcagtgcatgagaccagcaacgtattagtttctctgcatccttaccaacatttgtctcttttcctttttttaaaaaattatgatagccattcttgtggttgtctgtctcattgtggtttttatttctattccctaaaaaaaatgatgagattggccatcttttcttgtgcttgttggccatttatacatcttttttgaagaaatgttcattcaagtgctttttccatttggggggcattgtttgccttttcgttattgagttgtaagagttctttatatgttctgcatcctagacctttatcaaatatatcattttcaaagatttcctcccattcagtggattgcctttttactatcttgaatgatagttttgcaggagatagaattcttggttgatatttttctttcagtacttggagtatgtcatcatcccactggcttgcggcctccatggtttctggtgacaaatcagctgttaatcttgtacatgatgacttatttctcccttgccatttttcaggatagtctgtctttggcttttgacagtttaatgttaaggtatctcagtatgagtttttaagtgtatcctattgggagatccttgagctgctttgatgtgtagacttgtaattttcatcaaatttgggaaagtttggccattatttttacatatattcctttttttttttttttcccggagtctcactctgtcgcccaggctggagtgcactggcacgatctcagctcactgcaacctctgcctcctgggttcaagcaattctccctgcctcagcctcctcagtagctaggattacaaacgcgcaccaccacagctagctaatttttgtatttttagtagagacagggtttcaccatgttggctaggctggtctcgaactcctgacctcaggtgatcctcccacctcggcttcccaaagtgctgtaattagagcgtgacccattgcaccttgccaatttttccatatattccttctgctcctttctctgtctcctctccagtagcaactcccattatgtgtattcagatgtttgatggtatcttctgggtttcttaggctctgttcatttttttccctttatttttaatttctgctctacagatcaggcaatcttaattgacctgtcatcaagttcactaattgtgtcttctgcctgatcaagtcttctgatgaacccctctagtacatttttcatttcagataatatatatttttcaattttaaaattcctatttggctcctttttataatttccatctctttatgattttctctatttggtgagaattcattctcatggtttccattagttctttgtacacagtttccattaactccttgagcatatttgaaatagttgatttgaagtcgttgcctaataaatccaatgactaggtttccttatggaaaatttctgttcatttcttttttcctataatgcagtttcattcattttttgtttctttttttttttttttttttgagatggagtctcactctgtcacccaggctggagtgcagtggtgcaatcttggctaactgcaagctctgcctcccaggttcacgccattctcctgcctcagcctcccgagtagctgggactacaggcgcccaccaccacgcctcgctaattttttatatatttagtagagacagggttcaccgtgttagccaggatgatctcgatctcctgaccttgtgatccgcccaccttggcctcccaaagtgctgggattacagccatgagccaccgcgcccggcccatttttttgtttctttacatgcctcataatttatttgctgaaaactactttcagaatattacaatatggcagttctttaaatctgatttcccccctccccaaggtttgttgtagttggtattgtttctttgtttagtgacatttctgaactaattttgtaacgtctgtattggtcatgtgtggccactgaagtctctgttctgttagcttagtgttcagcttgggattaatttgtcagagatttttttaaatacctggaacccaaaagatgaccagtctttgccaatggatctgaattacatgttggagcatgccttcaaaactcagctaaagcatcttacaactctgacttagccttcagttccttcttatgcagagcctgaaggtcagtcaaaggtgagggcttggtgccttctcagatcttctctgagcatgtgttcatccctgggtatgagcatggccttctagaaatgtgtggaggccgggcgcagtggctcatgcctgtaatcccagcactttgggaggctgaggtgggcggatcacctgaggtcaggagttggagaccagcctggccaagatggtgaaaccacatctttactaaaaatacaaaaaaatcagccaggcgtggtggcaaatgcttgtaatcccagctacttgggaggctgaggcaggagaattgcttgaacccaggaggtggaggttgcagtgagccgagatcacaccactgcactctagcctgggcgacagagcaagactccatcttgtgggggaaaagaaggtgtggaaagatgctctactcctcagagcatcttgttcccaacttctcctcccaggttttttggttagtcttttgtttgcttcacagttttcccttgccccattgagcagtggctgatttgcctttagatgtgttgggacacacttccctctccaccctccagcttccataggtgtagcctcttcagacctgggagagtttggagttacacaaataaagggaagccctttgatccagcccatcagggagccagcagacaggtcagaagagaacagccacaggtttttgagaataaggtgcattctgttcccttcagcactagaaacacaggttgttgtcctcaaggcaaaatggggaatagagtgtgcagctagagtcagttaaaatgtcacaaatctctcttacccagattcagctgtttgtcttgattaggcattctcctgtggctgtaaacttttgatgacattcaagagctccaatgaagttgattctgtgtttgcccatttacatactgtttttgtgaagggatggagttgtggagttccctactccactaccttcactgacattacttcgtttaagtccttcataagcacctctgttcctaggtctgtgctgggatgtgggagtagtgaagaatgcaacagacatgccccccaccctcatggagctgtctgtctaatgctatctgtatgaaatgaagatctccttctttccctgactatatattctctgtagttaaatcttttgggctttcagattctgtatttaaacctggacaggggctcctgggaccagttatcctgcaaccaccctagatattgcttgtggggtgtgtgtgtgtgtgtgtgtgtgtgtgtgtgtgtgtgtgtgtgtgtgtgtgagtgtttaagacggttgctatatttattcaattttggcataattatttctctgctcctgaagtcacacctcttcaccttcagaactgatttcagtttcatgggagagcttgtctgctgcacagtccccctacatcatgtgtcttttctccatgtacagggaaccaagttgataaacctaggctgatctcccagctggagcaagaagataaagtgatgacagaagagagaggaattctctcaggtacctgtccaggtgagcaccaggtggatataagtccttgtgaggaacagctctggccagggactgagaagttgggagtattataatacattaggaaatatcagtcagagaactgtgtaaatgccccttttcccaagaaggccaagaacgtttggtctgagccccctcatgtaccttcatgacttccaactttctgtcatctcatactttacttgggcctcaggggagaaaaaaagacatctctttttctgaaatttaagtctcctatgagctctttgatcagtttcagtccaccttgccttcctgacaattccttcattctgtcaacatcaatctcaatcttcctagagtctttcttaaacattgcctaaaattttcacacccatatctctttcaccgaatgccttctcaaaaaccctcacctctcagattctgccttcactcacgtatgcattttactatttcaccatcaacttaaaatttgcctcttttctatcaacttaaatttctttttaacttgtttcagatgtggagaatccatttaaagccaaagggttaactcctaagctgcatgtttttcgaaaagaacaatctagaaatatgaaaatggtaagactaacatgggtgattcctggtttttttcatggtagaatgccctacatgagaaaagccacaaggactggccttgttggccaggcacagtggctcatgcctttaatcccagcaccttgggaagctgaggcagttggatcatgaggtcaggtcaggagttggagaccagcctggccaatacggtgaaaccccatctctactaaaaatacaaaaaaaacttagctgggtgtggtgatgcgcacctgtaatcccaaatacttgggaagctgaaacagaagaatcacttgaaccctggaggtggagcttgcagtgagccgagattgtgccactgcactccagcctggcgacagagcaagactctgtctcaaaaaaaaaaaaaaaaaaagtggctttattaaatagttattaaaggaaagtgtcatttttttcaaagataaagtagtacctctggagagatactgtgaaattattttgaatttggagaaaagcattagttagccccaaacttgtttttcctgagaattcccacaagtaaatatttccagtagtctgagtcagatattggatatttgaaaaagaaattagccttaaatttatcaaaaatactctgtgaatatgataaagatttgtagaaagaatccatcttctttaaatgctaagaattcaaactgacagaagccatgtaccagcactcatgatggcaaaaacattaattccaatactatgatacacaacagaattcctgggagaggaaattcctctgacagcattcaatgttaaaaatattataaatggtacttattgtcatctcttaatcaataggagaggaatcatcttggagcaacactcaacgaatgtaatcagtgttttaaagtcttcagcacaaaatcttcccttacacggcacaggaagattcatactggagaaagaccctatggctgcagtgaatgtgggaaatcctacagcagtagatcttaccttgctgttcataagagaatccacaatggggagaaaccctatgaatgcaatgactgtgggaaaaccttcagcagcagatcttaccttactgttcataagagaatccacaatggggagaaaccctacgaatgcagtgactgtgggaaaaccttcagcaattcctcatacctcagaccgcacttgagaattcacactggagaaaaaccgtacaaatgtaaccagtgttttcgtgagttccgcactcagtcaatcttcacaaggcacaagagagttcatacgggggagggtcattatgtatgtaatcagtgtggaaaggctttcggcacgaggtcatctctttcttcgcactatagcattcatacaggggagtacccttacgaatgccacgattgtgggagaaccttcaggaggaggtcgaatctgacacagcacataagaactcatactggagaaaaaccctacacatgtaatgagtgtgggaaatcctttaccaatagcttttctcttacaattcacaggagaatacataatggagagaaatcctatgagtgcagtgattgtggaaaatcctttaatgttctctcatccgttaagaaacacatgagaactcacactggaaaaaaaccctatgaatgtaattattgcgggaaatccttcacaagtaactcctacctttctgtgcatacgagaatgcataataggcaaatgtgaattcaataactgtgggaaaagcattcattgatctttcatgcctcagataacatgagcaaactctaacaagatgtatgaatcacctgctactgtgtaacaaattaccccccaaaattttgtggcttcaaacaaaaacacttgttatctcaaaatttttgtaggtcaggaattcagaaacaacatagctctatagttcttcaggatatctcaagaggttacagtccagatgtcagcagaactgtaatcatccagaattgttactggtgaagggaccacttccaaatggcttacaagcccgacaagtgcatgctagctgtttccaagggagctgcgcttccaaatcacgtaggcctctcaacagggctgagtttctttatggaagcaacttctccccaaagccagtgatctaaaggagccaacacagaaagcataatgtcttttatgacctagcttcagtgagatatgttttcatgtccctgttacattggtcatacacaccaatcctgatacaatgtggaagaacaccacaggaggtatgaacagtagacatttggaaccatctggaaaacttgccatgaaatcagtggaggaaagccttcagctgaccctcatttttttttttttaagacaatgtctcactctgtcacccagtctggagcgcagtggtgtgatcacagctcactgcagcctctacttcctgggatcaagtaattctcctgccccagcctccaatgtagctgggactacaggtgcatgacaccatgtctggctaatttgtttttttttaaactagagggagggttttgccatgttgcccagactagtctcaaactcctaggttcaagcagtcctttcatcttggcctccagaagtactgggattacaggcatgaaccaccatgcccagccaacttctaaactgatcaatatgggagtagcattcaatcacccacaggttaactcactctagagagaaatcttgtgagtgtaatctgtatggtaaaactttgagctcaaactttccccctaccaaaaaaaaagtatctactggggagctgcccaggtaatgcagtagctgtaggaaagccttcagtgatggcttcagggagtcacatgacaactcacaataaggggaaaccctgtgtgtggcatcaaaaatggaaaaccaggggacactcattccttaagtcacatttcggagatcatacaacagaggaatatgttgagtatacacagtgttgaaaagcctgtgacacaaacagtcatattaccaagcacaagacagtatagtttggtatgctataaaagccttgaatattctctccatttttaagaagtgagattcatactagaaaaaccattgaattccatcagtattagaatgtcatttttccacatttttaggaacctaactcagtgtaagataacaatttatacaatttattttttgagacagggtttcatctgtgcccaggctgtagtgcagtggtgcaatcttggcttattgtaacctctgcctcccaggcttaagggatcctcccacctcagcctcccaagtagctgggactgtaggcatgcaccaccatgcctgtctagtttttgtaaagatggggattcaccatgtttcccaggctgctctcaaactcctgggctcaagtgatccacctgcctcagcctcccaaaatgctgggaatacaggaacgagctaccactctcagccagaacttcttaagataaaggatgagggaatgttttcagtgatacctcttatattaggaaaaatatgtaaatgttccttggatgcaatactcacgagtgtattaatttcagaaaaattttcagtgattcctccctttatgcatgagagaattcatttagaggaagccctaggaacgtaatcaatgttaggatgcctcatctcttaactgagtggccacgcagtaacttagaacaaaaggtgtaagtgctatgaatgtggaattaccttcatcaatgtctcatttgtaggttgggccactagctcgttcattttcagtcttttaatataaacatttatggctatagtggtcctgaaaatcttactacctcgttttatatacagtgtatttattataattctaaaacatcaatacaccaaatattcagaaaggtatttccaaacagctcctgagtgatctagtttgttataatagaaattagacatttgccaggtgtggtggctcacacctataaacctagcattttgggaggctgaggcgggcagatcaccggaggtaaggagcttgagaccagcctggccaacatggtgaaaccccgcttctactaaaaaatacaaaaattagccgggtgtggtggcaggcatctataatcccagctactcaagaggctgaggaaggagaatcacttgaacccgggaaatggaggttgcagtgagccaagatcatgccacttcactccagcctgggcaaaagagtgcaactctgtctcaaaaaaaaaaaaatcagacaatatttgatatatttttttctaatttaatagtattttgccagagtacatggactttgtgattttggttgttttctctttgtgtcctaatatagcaaatactgtttctttttttttttttttttttttttgagacggagtcttgctctgttgtccaggctagaatgcagtggcgcgattgtggctcactgcaagctctgcctcccagattcacgccatcctcctgcctcagcctcccgagtagctgggactacaggtgcccatcaccatgcccggctaatttttcatatttttagtagaaatggggtttcactgtgttagccagtatggtctcaatctcctgacctcgtgatccacctgcctcggcctcccaaagcactgggattacaggcgtgagccaccatgcccggcacaaatactgtttcttaatgttcattctccctacttaaagaaaaagataagttgtcaatgagcagtattgaaaatgtacagtggggccaggcgccatggctcatgcctgtaatcccagcactttgggaggccgaggcaggcggaccacctgaggtcaggagttcaagactagcttggccaacgtggtgaaacctcgtctctactaaaaaaaatacaaaaattagctgggcgtgatgacaggtgcctgtaatcccagctacttgggaggctgaggcaggagaatcgcttgagcctgggaagcggaggttgcagtgagccgagattgcacaaccacactccagcttgggcgacagagtgagactccatctcaaaaaaagatgtacagtgtactaggctttcctgaagcttagacaggctttatcccactctgctggctaaaagaagtaggaataacgcactgggtgagacaccgtctggcttattctcatctattttcttttcattcttttggaaagtggacacaaagcatagagttaaaagagcttttttttttttttttttttttttcttcactgtggtgataaaaaccacagtgcaggggctgggcgtggtggctcacgcctgtaatcccaccactttgggaggccaaggcaggcggatcacctgaggtggggagttcgagaccagcctgatcaacatggagaaaacctgtctctcctaaaaatacaaaattaaccgagcatgttggcgcatgcctgtaatctcagctacttggaaggctgaggcaggagaattgcttcaaactgggcagaggttgcagtgagccaaggttgacccactgcactccagcctgggcaacaagagcaaaactccatctcaaaaaaaaaaaaaaagaaagaaacagtgccgaaaaatcacaatgatttgagttcttcaaaaacctttgattggctgcattggctctgttctgcatattactagacttcttacatgatcacaagtaaccactaattggttaaaaccaaagagagagagagagagagtgtgtgtgtgtgtgtgtgtgtttggttggggggtgttgtgttagcttccaggtgaatgcattatctgttaatcctgtttattgatctgtttttataagtgctccatgattctctgaaaacagtatactatgtatctaatttttggatacaggatggacatacgtactcaaactgtgtttttcaatttgtactgtatttgtttctctcgacctgacttagtgatagaggtatattaaagtcttccactagcatggtagattaacaaattctttctgtaattctgtcatttttactttatatatgtttatgtgtaatgtaactaggtgcgtagaggtttagatattctcctgtgaatttatttattttcagtaggggccataccttttcataccaaataattgtaatatgaaaatatattaacaaaaagagatcaaacatttcgctagcccatcctatagaccaggcgctcttcaaagtgccttataaatattaactgcgtcctcactataagcttgcaaactgtgctattactgtctccaacttacagatgggaaaactggcatggaaatgtctaggttgcttgcctgagttcaccagctagtaagtggtagagcacagattggaatccagacaggtgattctcataaccactagcctgttcattgagtacattccatgtggctaagcactgtttgagatgccatgtctagagcagtgaatgaaactcaagttttgccattgaggcacttacatcctaacggggaggggtgaattatagaaaaatcaacaacatggccgggcgctgtgactcacgcctgtaattccaatactttgggaggctggggcagatcatgaggtcaggagtttgagaccggcctgaccaacatggtgaaacgccatctctactaaaaatacaaaaaaattagctgggtgtggtggtgcgctcagctaatcaggaggctgaggcaggagaatcgcttcatcctgggaggtggaggttgcaatgagccgagatcgcgccactgcactccagcctgggcaacagagcaagactccatcgaaaaagaaaaatcaacaatattcatgttgtgcagaaaaataaagcattgtgagagagttacggagggctggggactttccattttatgtagcataggaaggaaaaggcccccagttaaggtgcatttgaggagagactattgagtaggaacttgtggcaagaggactgttggcatgcaaagacccacagcacagaggccagtatgactcaggtaaaatagggattcagggattagagggtaatcggagatgcagatcctgatcttgtggggttttataggtcattgttagggcttttccttacatgttcaggaagttggaatatcaagagtcccagcaggaaacagttgacacacacgtcaactgggatgattcaagcgcagtttatatcaaggggctcctcacagaattgtgaacaggatgtagggaaaccacaaaaggtacttgaaatggaacatcggtcttctccccacctcagatacgggtgcttctggttctccagccttcagactcagactcgcaacttacaccattggccctcctggttctcaagcctttggacttcacactggggtttacactgttggctcccctgttttcaggtctttgagcttggactggagcaagactaccagctttcttggttctccagcttccaaacaaatggcagatcgtaggacacccataagcctgaagggacaaaggaagagaactgcaagttgttgttcaagcgaggagagggctgcattccaggagctgacaggaggtcagtgaggggcaacatccagcctcgagttctgcaagaaatagtaagggtcggccaggcacagtggctcacacctataattctggcactttgggaggccgaggtgggtggatcacttgagatcaggagttcaagaccagcctggccaacatgatgaaacccattctctactgaaaatacaaaaactagccgggtgtggtggcatgcgcctgtagtcccagctattcaggaggctgaggcaggagaattgcttgaacccggtaggtggaggttgcaatgagccaagatcatgccattgcactccagcctgggtgacagagtgaaactccatccccacccccccaccaccaccaaaaaagagaaagaaatagccagggccagccctccttgtccttcattcttcttatatcatatttgggttccccatttgccaaactcaaccaaaagccaataaggtaagggagttcgttgatagcattcatagtaactaatcatcccaagtacagcagggtagaggaggtgaatctgctggggcgaatggaagatacccagtattggtcactccttttgcttctcagaatctactcatgcccatcacctggatggaaagttcatatccaagcccaggaattctatcagttgctcagctaccctggggtggtgtccatgcactgatactccccgatgaagcctaacatagttgccaacaccagtgtttcctgtataggatgaggaacagagccattggggaggaaagcaaaagaaataattaacctggccaggcgcagtggcttacccctgtaatcccagcactttgggaggccgaggtcggtggatcacgaggtcaggagtttgagaccagcctggccaacatggtgaaaccccgtctctactaaaaatacaaaattagccaggcacagtggtgggcgcctgtaatcccagctactcaggaggctgaggcaggagaatctcttgaacccgggaggcggagattgcagtgagccgagatcatgccactgcactctagcctgggtgacagagtaagacttcatctaaaaaaaaagaaaaaagagaagtaacctaaaggacttggttcccagagggaaacacttccaccaagagacacagtaagagtctcatcggatgttaaactgtgacttctatgagaccagcacacaaggaaagaagtcaccatactgacttaggtaattaatgctatcatccatagaatctgaggctgctgttacatgatgagtgcagggaggaaaacatttggcattcacggaatccattgggatgtctcttactattctttccccaattttaaagataaaaaaattttggccaggcgtggtgggtcacgcttgtaatcccagcactttgggaggccgaggtgggcacatcacaaggtcaggagatcgagaccagcctggctaacatggtgaaaccctgtctctacaaaaaatacaaaaaaattaactgggcgcgttggcaggcgcctgtagtcccagctacttgggaggctgacgcaggagaatggcgtgaacccaggaggcggagcttgcagtgagccgagatcgcgccactgcactccagcctgggcaacagagcgagactctgtctccaaaaaagaaaaagataaaaaaatttcaccagctatgtcctgagaagggcatggtgaagaccccgtaggcataaggatctggagcagctctccaggtaagccacctagaccagcaggatctaggtgagaaggaaatctagaattttcaccctagtcaagggtaaagggaatctggaaggtgcaagtaaaggagtgtgataagcatcaattgcatctctgagacttgttcaggtggaaagggctgtctacagtttgtcccactgatcttcctcttgtcagtttctccaggcaacgggaccaacctggatcctgagggcacttactttaagaatcctggggccgggcacagtggctcacgcctgtaatcccaacactttgggaggcagaggcgggcagatcacttgaggttaggagttcgagaccagcttagccaacatggtgaaacctcatttctactaaaaatacaaaaaatagctgagtatggtggcacatgcctatagtcccagctactccagaggctgaggcaggagaatcacttgaactcaggaggcagaggttgcagtgagccaagatggtaccactgcactccagcctgggcaacagagggagactctgtctcaaaaacaaaacaaacaaaatgaatgcagggcatctgagtggcacacatggtggaccacagtaggtacagtggtggcactacccagcaaaagagctcttcacccaatgtgctagaagccaatactatgacatcagatttttgagaaaaggaaaggtttgtattgcaagttaacaaggagacaggagtccagctcaaatttgtcttatgctgactttaaggcaataattttcttagaaaaggtgtagggcgtggattctgggattagcaggcgattggtgggaggaaaggtctgttaagtcctcaggcaggtgcaatgatctcttcatgcctccccatgggttccatgtgcaaagtcatactaactcaagggagtttgtatgaaacacgtggaaatttgcactgtgacatcagcaagctcattctgcacaaactccatttggccatgtgggttctcacagattttaggcagttttgttacaagtggaggcagtttcagcgttttagcaagttatttctttttttacctgccatcctgcaaactcaatgagaggtgaagccagctggacttcctgggtcgagtggggacttggagaactttcctgttttacaagaggattgtaaaacacaccaatcagcactctgtagctaggattgtaaaccgcaccagtgagcgctctgtagctagcaagaagattgtaaaatgcaccaatcaacagtctgtaaaacacaccaatcagcaagatcctgaaagcagccaattgcagggaggattgaaaaaagggcactctgataggacagaaacagaacatgggaggggtcaataagggaataaacgctggccactccagccagcagcggcaaccagctcgggtccccttccaagctgtggaagctttgttcttttgctcttcacagtaatccttgctaccgctcactctttgggtctgtgccatctttaagagtgaaggtctgtggcttctttcttgaagtcagcgagaccacgaacccaccagaaggaaccagcttccaacacatcaagaatttctgctagtctttgctttaacactttaggcatggtttcagtggcatatttcccagattcttcctttaagactaaggcactaaggccaggcgtggtgactcacgcctgtaatcccaacactttgggaggctgaggcaggtggatcacgaggtcaagagatcaagaccatcctggccaacatggtgcaaccccgtctctactaaaactacaaaaattagctgggcgtacctgtaatcccagcactttgggaggccaaggccggcggatcacgaggtcaggagatagagaccatcctggctaacacggtgaaaccccatctctactaaaaatacaaaaaattagccaggcatggtggcgggcacctgtagtcccagctactcgagaggctgaggcaggagagtggcgtgaacctggaaggcggagcttgcagtgagccgagatggcgccactgcactccagcctgggcgacaaagactccatctcaaaaaaaaaaaaaaaaattagctgggcgtggtggcgtgtgcctgtagtcccagctactcaggaggctgaggctggagaatcgcttgaacctgggaggcggaggttgcagtgagccaagatcttgccactgcacgccagcctggtgacaaagcaagactccatctagaaaaaagaaaagactaaggcactcccctagctgctggaggtgttgcctgatgatggtgatgctgctgtcctctctgggaactccccaaggcccagaggaaagtgcccaacccaagattatgctctctctccaggggttgcctacttccagtgactggttgatgtagggggtacaaaggtccagtgcctttgtttcaatgtaggacacccctgaagggcaaccccagcaccagaactccctgtgggatcgacggcagcctcagttgacaagttacatgtcagcctcatctgtcccctccgcttctcgcatgcctttaaagatgttgttcccaggagttttatccaataaacaaaaaattgccagcacaaaatctgttcccagaaaacctgatccgagataagatcactctatcagggtaaagaatccattcagggccggtctcaggagatcgagaccatcctggctaacacagtgaaaccctgtctgtactaaaaatacaaaaaattagccgggcgtggtggcgggcgcctgtagtcccagctactcaggaggctgaggcaggagaatggcgtgaacccgggaggcagagctttcagtgagccgagatcgcgccgctgcactccagcctgggcgacagagtgagactccatcccaaaaaaaaataaaaataaaaatccattcagataagggactggcagagagaaagcagaatgtggaatggatgtggaagaattaaattcagtcctgaagaccaggtcccaaagcaggaatagaagacagctatgctttgggtttgggttttttaaaaaatctttaattttttccgctttttccctggttccccaccaccaccatcaccattttatatgaagagtcctggttgtggccaaagcttaaggtttctgatgggaatacgaccaaatgacattatcccaacagtagcttcctttgtatctctttttttttttttttttttttgagatggagtctcactctgtcacacaggctggagtgcaatggtgccatctctgctcactacaacctccgcctcctggattcaagcgactctcctgcttcagcctcccgagtagctgggactacaggcacacgccagcacacccggctaatttttgtatttttagtagagatggggtttcactatgttggccaggctggtcttgaattcttgaccttgtgatccgcccacctcggcctcccaaagtgctaggattacaggcgggagccaccgcgcccggccccctttgtatcttatgtagggacatgaacttagcgccaagtgaaggacaagaattgatatccaaaatccaatagatttttcttttaaatacctgaaagtgaaactggcccaattttcccatattgctgatgtttatggtttccttgaataaacaaacaaattgatcttcccaatcttaaaacttaagaaagttacatttatcttatctgagttcctttctcaggaaaccaaccatcaggcctcccagatagtatctaggagctgaaacgcaccagaatactgcatttgtacagtgagacatcagacccatcacccatcatgattgcctaactgaccacctgcttcctgttgaccaactcctcttccttacccttccctaattcctgtattcccacacatggtaacatttcttccctgctatataaacctcaaattttagttggtcagggagatggatttgagattgttctcccacctcctcagctgcagcagctgattaaagccttcttccttggcaatactcattgtctcagcgataggctttctgtgcagtggtgagcagcaggacctagattgaacccctggtgtttcagcaacaacatagttcatcaccagcagaactgcacttcaagaaacactaaagaaagttttgggccagacacggtggctcacacctgtaatcccagcattttgggaggctgaggcaggtggatcacctgaggtcaggagttcgagacaaggctggccaacatggcaaaaccccatctctgctaaaactacaaaaaaaaaaaaaaattagctgggcgtagtggcggtcgcctataatcccagctacttgggaggctgaggcaggagaattgcttgaacccaggaggtggaggttgcagtgagctgagatcgcaccgttgctttccagcctgggcgatggagcgagactctgtctcaaaaaaaaaaaagaaggaaggagggagggagggaaggaaggaaggaaggaaggagaaggaaagaaagaaggaaagttttggggctggaggaaaattattccatgtggaagcaattccagaaatatataaggataatcaggaaagataaaatgtgagcaaatacaaataaatattgactgtataaatcaagcctgtatagttttaacacttttatacgtctaaatctttttttttttttcagacggagtctcactctgttgcccacactcacctcactgcaacttccgcctcctgggttcaagcaattctcttgcctcagcctccaagtagctgcaactacaggtgtgcaccaccacgcccagctaatttttgtatttttagtagagatggggtttcgccatggtgaccaggctggtctcaaactcctgacctcaagtgatccatctgccttggcctcccaaaagtgttaggattataggcgtgagccaacgtgcccagccctaattttttttttttttcaaataaaaagagttttaaatcacattgaactggtcccttaaaactagagataatagaaagcatggcaagccatttcccagtccccctaagactagagattatggaagccccagcaagtgattctcacaatctgcatacagcagtagagctgacagaagccctagcaggtaaccaccagtcaccctcaaaacaagaggcaacaggatgccagatctccacccctcaatcacttacaaacacaaaagatggagtccaaacatgaagacctccgtcatcgcgaaactactccagcaagcacccctcagtcacgtccaaaactataacagaagtccctgaaatgaccccttcagatgcccctcaacactaaagaatggggactccaagcccaatggcctacccagtctataccaacagtacaggcaagcggagacccagaatatgaccctccccaactagagataagtggaaccccatccaataatccctccatcctctccccaaacaatacacagtaaggcctctatctgataaatgctcttgacccttcaacactagaaaaaaatggaagccccaggcactggccctccagttacctccaacatcagagacaatgaaagcttcgccaagtgattccccgtatcgctcctacattaatgatggaaactccaaaaaccaatcaaccctcaatcctctacacactcaagaaaggaactccaggctgggtatggtggctcacgcctgtaatcccagcactttgggaggccaaggcgggtggatcacgagatcaggagttcgagaccagcctgaccaatatggtgaaaccgtctctactaaaaatacaaaaattagccgggcgtggtgacacgtgcctgtagtcctagctactcaggagactgaggcaggagaatctcttgaacccgggaggcagagtttgcagtgagccaagatcacaccactgcgctcaagcctgggagacagagcaagattctgtctcaaaaaaaaaaaaaaaaaaaaaaagaactccagcaaatgccaccattcttacccactaccgctgcaacatgcatcccttgtcttcccaagactataaataagtatccccagcaatgacacccaaaacaagcaatggtcagaatctcaacaggcagccccccagattctacaacataagtgacaaactcataccccagaaaactatctctcttcccattatcccaaagtaagagttaatagaagcatcagcaagcaacacccttaacataaacgaggaggggagcccagaatgcaaatcccgtctcccccaacatgagttgactgcccctgcggtgacccctcctttatcccaaacacaaggaataatcttagccccagcaggcaactcctgcagcctccccttgcaatatgagtatctctaccctcacaatatagattgatagagccctatcaagccaagtgtcccctgctaggggaatgttgggtactccagtctcagaacatggaagacgatggtagtcctgacaagctggcaaatactctaagctcccataatacaggaggtgatacagcccagcaagcaaaccttccaacatttcctgcacccagcagacccttatcagctgcattcccagttgactctcagagcatctcctgctcgctcactagaagcaaagaaagactagagttgggggtaaggctgagaggaagagagaggggagaagggtaaaagaaagagaagagggggaaaggagaccttccaagttgttctaaacccggccatgaattccagatgcctcaaacagctacaatcagatcaggcactccagcacaaaaaaagagattccgggctgatgaaaagaggtggtctgaaggaaaggtgggtgtgttgactagccttcagaatgctcaccaaagacccttgccacctgatattcctgtcctgtgtaccccacctccaatattgaatcatacacgacccatatgatcaatacagcactgttgcatgtgacatctgaggctaggtcataagacacactgaagcttcctccttggtctcttctattgctctttctctaggagaagccatccgccatgccatgaggagactcaagcagccccgtaaccagtaaccaactcaccagcaccacattgctagccaggggatgagccaccttagatcttccagccccaaattttgaactctaattaatgatatgtaagctatctgcaacctacttcaaaatgcatttaaaaagatgaattgatggatgatacagagatgtatatgacaaagtatagtaaaatgttactgatgaatgttcctgtacattttttcaaaaattatttccatgcttgaacattgctcataataatttgttagtattcaagaactcctacgaagcagtaagagaaagaccaagagttaattagagaaaggagcaaatgctaacaacagttcacagaaatacaagtggctctcctaagaaaaatgggaagtaatacattgagattccctttttcattgatcaggaatttttttcttttaaaaagataacagattgaccaggatgtggagacactggcacctccatatcataatgacgggaactcaattagtgcaactcccccggactaagacaaggacccaaccagacccagagccacgccgagcccagggtgccatggggagacgcggaaagagccgaactgaagcggcgaaatcggagaaaactgaagccgggcggagaaagccgaactgaacgaactgagccgaggagcggcggagaagccaaggctgggcgaggggagccaaagacgggtggtgggagccgaggtcggccgagaggaaccggaaaagccaaggccaatgggaggagccgaggccaggcgggaggagccgagcagggccgaaaagcagcgggaagggcggcggagaagccgagccatggccaggacggagggaggggaagtttcaggtcggagacagagagggacaggcagcgccatggtaggacgccaggcgaggacggatggggaagccgaagctgggcggaaagagccgaagccaggcgcgaaggaagccgaagctgggcgggggaagccgaggctcggcggaagagccgaggccgggcgggaggatccgagctggaccgaaaagcggtggcactggcgccaagcgcgggaggtcgcggggcagagagggcgaagggagggtagcacctggggtgagggcgggcgggagagtcgagctgggcagaaagagcggaagccgagagcaagtgcggggttgagggcgggcgaaccgaggcagggccctggaagccgaggtccagcgggtggcggagagggtaaccgaggctgcgtgggaggagccgaggtcgggtgggagaagtcgaagccccggtcgaaggagctgatgccaagtgggaggagccagtgccgggtgggaggagctaagcgggcgaaaagcgctgaggttgagccgggacccatcttcttgggagcaggggaagggaggtcaggggactgcagtggggaaggggccgtggatggttgagcccgaagctgtcaacatggccagagtcatctgcagggcctcaaactgcctctgcaaaaattaataacagtgagaaaattatgacagtgaaagacacctgacccactccatctcgcctttaacctccaaactctcctcggtcattcctaggtgtgggccaagctaaccttgggagaaatttagttacagtttaaataacaatagcctttcctaaaactaaaccgccttataaaaataagagatcaccaagttatgattagagcagggcctgaattctgctcagatgtagacttcgttaaggattaccagcccttgctcaggtgatcacaagatttgtaacccttccaattactcctgtaaataacatcactattgtagaagctaagattggccttttgagatgtcatttaagacttttgggccaggcacagtggttcatgcctgtaatcccaccactttgggaggccgaggcgggtggatcacctgaggtcaggagtttgagactagcctggccaacatggtgaaaccccatctctactaaaaatacaaaattagccaggcatggtgatgcatgcctgtaatcccagctactcaggaggctgaggcacgagaatcgcttaaacctgggaggcggaggttgcagtgagccaagactgcgccactgcacttcagcctgggcaacagagcaagagactgttggggaccagcctcaacaccacccgtagggtactctaagtccggtggcgtcaaaggattgagaagagacaagttaaaggtggggagccaggggggccagatgcgaggtaggaggcggcaaaaggctcagagctctggtctccacactattgagtacaatcacttagatctgagaagcagatgttcagggcaaaacagtgaaagggaggcagtgcgtcatacgcgtaatctatagcaatagtggtttaaatgattctccgttgtgctcaaacaacatatctttaacttatcggagagtagctagtgggagcaggctttactaggagcctgcacgtctgtccacattccagtgtttcaaaggagtgtctttctccttgaacacagtgtttacagataagagagcaggtctcgctctgagcatgtgaacatgatggcaattaggaggctttcctcctcagaagccttttgtggctttccacaacttattgtcccatatttttatggccagtttatacaggcaccccacaagcccttttcccaacagagactctgtctaaataaataaataaataaataaataaataaataaataaataaagacttttgcatttctgacgaccggatgattcctgtggcccccacccagaaacaaactcagcacacaaggactgtttatttccacgcatcctggaccaattaacagcacctgttccctgcctccctgcccacgaaactatctttaaaaaaccctagcctccaaattttcaggttccccatttagccggccgtgcattttgtttgtttgtttgtattttctgagacggagtctcgctctgtcgcccaggctggagtgcagtggtgcaatctcggctcactgccagctccgcctcccggcttcatgacattctcctgcctcagcctcccgagtagctgggattacaggcgcccaccaccaagcccggctaattttttgtatttttagtagagacagggtttcgccgtgttagccaggatggtctcgatctcctgacctcatgatccgcccgcctcggcctcccaaagttctgggattacaggcgtgagccactgtgcccggccaatgtgcatgttttgaattctttctctattccaattctcctgccttgataaatcagctctatattgatgagtaagatgaacttctccggtggtttcaggtcctcctgccctcccggtcctgttgctccggccctgccaccgtcccctgcgagggctgctccatcggcaacagctgcatgttctctgcccccagtgaatgctcattggtgatatttgcatagggacaccccatcggcctgacagacagtttctctgaactgcgctgagacctggcccctcacctgtttatcctcacattggaattctgttttggtgtttgctttttggaggacttgcatgataacactgttttacgaatgaggaaactgaaacacgaaggcacagaggggttaagtaacttacctaaggttacgcagctggtaagggatttaaatgggatagtctcactgcagaatcagtacccttaaccatcgcgctatgagcgaaagagacaatgagagaaccaaatcaagataaaaaagaacatccttatcttgattttgtggtctccctgaactttttttttttttaatttgagacagagtttctctcttgttgtctaggctggagtgcagtggcgccatctcagctcactgcaacctccacctcctggattcaagcgattctcctgcctcagccttccaagtagctggggttacaggcaagcgccaccatgcctggctaatttttgtattttttagtagagacagggtttcaacatgttggccaggatggtctcgaactcgtgacctcaggtgatccacctgcctcaccctcccaaagtgctgggattataggcatgagccaccgtgcctagcctccctggcctctttcaatgaggagtttctaatactttcatccgtttttcccacggctgacacatctagagtgccgttctttttttatttcaaaatatgccctgaagatggcagtattgcaccaccctaaatccacaagctcttttccaaatgtttgccctgatgtccatcttctgaaaacaataatcaccaattagacatgtgagccaattagcattaactccttccatgaagaacaatgcaattgtctcctagagagcaactatacaatttattcactttgttttttgtttgttttgagatggagtcgtggtctgtcgcccaggctggagtgcagtggcgtgatctcagctcactgcagtctccacctccccggttcaaacaactctcctgcctcaggcccccttagtagctgggattacaggcatgtgccaccacgcccagctcttttttttttttttttttttgtatttttagtagagatggagtttctccatgttggtcaggctgatctcaaactcccgacctcaggtgatccgcccacctcggcctcccaaagtgttgggattacaggcatgagccaccgcgcccggccacaaatttttgtatttttagtagagatggggtttcaccatgttggccaggagggtctcaaacccctgacctcaggtgatccacacgcctcggcctcccaaagtgctgggattacaggcgtgagccaccgagcgtggccgtaaccaggctcaatgactttaactcttttcctcaatgattttcattcctcaatggctttaacctcttccaaatgattgcgctgatggctaacatatgtctgtcttctgaaaacaataatcaccaattaaacatgtgagccaattagcatttactccttccattaagaacaatacattggtctcctagaatgcaatttacaattactcactttgaacaagggaaatctcttcaactccacagacaagggagccactccctttctgatcacagattacagtgagcaatggaagtttcataatcgatggccttcactttcttctctggaatgtaaagttgactcagctgggaagaagcccataagaaaaaaagatcaatatgagacaaggagacttgtctgcagtatggcaggctaattatcttgaaaaacagtcctactacacaacatttaaaaagatgaatacacacctgtaatcccagcactttgggaggccaaggtgggctgatcacttgaggtcagcagtttgagaccagcctggccaacatggcaaaaccctgtctctgctaaaaattaaacaaaattagccgggcttggtggcacatgccagtagtcccagctactcgggaggctgaggcaggagaatcgcttgaacccaggaggcagagattgcaatgagccgagatcgtgccactgcactccaacctgggcaacaagggcgagactccatctcaaaaacaaaaaaagaatacaaggccgggtgcggtggctcatgcctgtaatcccagcactttgggaggccaaggcgggcagatcacctgaggtcgggagttcgagaccagcctgcccatcatggagaaaccttgtctctattgaaaataaaaaattagccgggcatggtggcacatgcctgtaatcccacctacttgggaggctgaggcaggagaatcacttgaacccaggaggcggaggtttcagtgagctgagattgctccattgcactccagcctgggcaacaagagcgaaactctatctcaaaagcaaacaaacaaaaatactccccagaaaaaccctatttccaaataaggccacattctgaggtcctggggactaagagttcaatatattggggttgcacagttgaattcatctcattgtttaggcacggggaccaacctgtcataccccatcaaccatcaaatgcggctgctctctgggaagggggaataaccttggacaaaatagctcccttaagcctgggaaagttccagaagagggactcagttgtccgcccccagaagacaactttcctggaagttggaagagtgagcacttggttctgaagaggtgatctgggtggtgcatgacagcatccacgacagtggatgtgccgtggctcttgctgcatccactacagcatccactacagcatccgctacctccacctcaatatccactacctccactacagcatccactacctccactacagcatctgctacctccactacagcatcatggatccaccacagcaatcaccacatccactacagcatccactacagaatccactacagtgactccaacacagtggcctcccactcctggggttatgcttcaggaaatgggtcagcaacctctaaggagcctggagatcaacagttgagaacattagaccatggactcatagtctaaaccacccaccaactatgtcagccctattaaaattatggcttccctcttttgtgaagtactttgaagatgttttctctcacttgtgtactatcctgatgaccactgtctcatctgtggtcatgcagaacacacatggagcagagccaaggccagaatttgcatttcctggctcccaagtctgactgtctcagcaacccacatccccattctaacccagagcccagccagagttcctcctctggttgtgaggctgtggtctatgaaaccaaagcctgtgccttgctttctcagcctgtcagggtcttaccactggataggagccttggatgaaaggacaggcagacagataaattgatggacagacaagaagagggatagatgatggatggatggatgaatggatggatggatggataggtggatggataaatggatggatgggtggatgaatggacaggtaggtggatagatgatgaatggatagacaagatggatatacagacaaatgggtgggtggatggatagaaaggaaggaaagaaggacagatagatggatgggtggatgaagagaaggcaatagacaaacatataggaaattacaaatacagatagataaaaaaaaaaaaggccccaagagaagtagaggtagaaacagaatggtagaaaagggggaggaggtcagagatatgagtgggaggaggaaggtgaaatgagagagaaagaaaagcaaagcccaaattatagtgtgacaggaagattgggtagcagaaatacacaagcaaaaaaagagaaacaagtgagaccaaaactggagaaataactcagagagagtgaccaagaaggagagaaactaaggaacacacacaagggaagcaaagggagagaagaaaaataagacaagagtgggaggaggagagggggaaatagagaaaaaaatgggaagacagaaaagtcctacatagaaggaaagacagagggaaagatggggtaaggagatacagaagtaatgtataaaagaaataaagtaggtcaggcgcacctgtggtcaggagttcgagaccagcctggccaacatggtgaaactccgtctctactaaaaatataaacaattagctgggcatagtggcaggtgcctgtaatcccagctactcagaaggccgaggcaggagaatcacttgaaccctggagggggaggttgcagtaagctgagattgtgccattgcactccagcctgagcaacaagagtgaaactctgtctcaaaaaaaaaaaaaaaaaaaagaaagaaagaaaaagaaagaaagaaagaaagtgagggaaccatggtgggtgcaagaggggagtagatggtgaggatggagagagaagggaaaaaaagaggagaagcacaaatgaagagaggcagaaacatggctgaccacaaagggaagcacacagaaggagaaagattaagagaataggagaaaagagcagaaggcagatacagaaaaagatggaggagaggatgaagcagacttgaaataaataaaacagagataaaagagtggcaagaagtagaaagtaggacagaaacaaggagggagcagggtgatgaagaaacaatcaagcaaacaaaaaaaaatcaaaacacaaggagaaacagtgagataaatacagagagaggaagggaattaaggggagaagtgaaaaggggaagccagggtggaggcagcaaagaagaggcccacactgaacaagatacaggaaagagagcagggaagagggaaagagaagaaagagaagtatttctttcttctagaagggtggaagaaggaggcagagatccaagggtagtagccagcactggaaatgatcctgaggcatcagataatgatgaagataatgatggtgatgataagaatggccatgatggcgatgatagtgatggtaatgagggtgatggtgatgagatggtgatgatgatgatggtgatgaagatggtaaggatggtgatgatgatgatggtgatggtgataggatggtgatgatggtgatggagatggtgatgatggagataatgatgatggtatagtgatggtgatggtgatggtgatgatgatggtgatgatggtgatgattatgatggtgatgatggtgatgatggtgatggtaatgatgatggtgaagatggtatggtgatggtgataatggtggtgatgatgatgatggtgatgatggtggcgatggtgatgatgatggtgatgaagatggtgatgatataatgatgatgagggtgatggtgacgatggtaatggtgatgaggatggtgatgatactgatgataatgatgaaggtatggtgatggtgatgatggtgatagtggtgatgatgttaatgatgatggtgatgatgacagtgatggagatgatgatgacgctataatgatgatgagggtgatgatggtaatgaagatggtgatgatggtgatgatagtgatgatgatgatggcagtgctgatgatggtgatgatgacagtgatggagatggtgatgatgatataatgataagggtgatgatggcgatggtgatgaggatggtgacggtgatgatagtgatgatgatgatgatggtatggtgacgatggtgatgaccgtgataatgatggtgatgatgatgatgacagtgatggatatggtgatgataatataatgatgatgagggtgatggtgatgatggtgaaggtgatgaggatggtgatgatggtgatgatggtgatgatactgatgatgatggtatggtgatgatggtgatgatactgacgatgatggtgatgacggtgataatgatgatggtgatgctgatgacagtgatggagatggtaatgatgatataatgatgagggtgatggtgatcacgatcatgatggtgatgatgatgatgatggtgataattatgatggtgatgatgttaatgctggtggaagcaacagctgacacatactaagtgcttactgtgtgccaggcaacttcttttaactgaggtataatttacatacaataaaagggataggttttaagcgtacagctcagtgaactgataaatgcatatacccatgtatttgctacctcagtcaaggtacagaacatgtccatcaccccagaaagttcccatgtacccctttcacaaccaagatcccgttacccccaccataggaaacccatgatctggtttctgtcaccatcaattactttagccatgccctgtgtaagtgctttacacacaccacaaatttattttatatcccgcaacacccgtaaggagcagggaccactgtcatccccatacacagggagattcgtacaactaatcataggagagccatggttcaaaatgaggcagagggcttccgggagctgacttgagccactaagacaaatataatattttgggggtcaggtgaagtaacctttccctctcaccctcttagagtctctgactgggactgacataagacagattaacaagataaatatacacatttcatttagttgaggatttttgtttagttttggggacagtgtctcactttgtcgcccaggctggaggacagtggcacaatcatagctcactgcagcctgcaattcctgggctcaaggagtcctcccacttcagtcctctgagcagctgggactacaggtgtgcaccactgtgcctggctaatttgtaaaatttttcgtagagatagggtctctctatgttgcccaggctggtcgtgaactcctggcctcaagtgatcctcctgccctgacctcccaaagtggtagaattacaggcctgggtcactatgcctggtctttatttagtaatttttacatgtgcaggggagattttgtaagaaaaacgaagacctaaagaagcagttggagctgaatgcttatgtactaggttggacaaaatatagtatggtagtttcatctcctgctttcaggaagaaaaaggaaagtcagagtgtccttcttgtttgctatttttcaagcacctttaactcaaaataaccaatgtgccaaagtggcatactttgttgttgtgaagtgttttttttttttttagacagagtctcgctctgtcatccaggcttgagtgcagtggcgtgatctcggctcactgcaacctccgcctcccgggttcaagtgattctcctgcctcctcctgagttcaagcgattctcctgcctcagcctcccaagtagctgggattacaggtgtgcaccaccacacccagctaatatttgtatttttattagagacagggtttcaccatgttggcctggctggtctcgaactcctgaccgcaggtgatccgcctgccttggcctcccaaagtgctgggattacaggtgtgagccactgtgcccggccaaaagtggcatactttggagtggcatatttggatcccttacacaggcaaaggcagaatggaagcaaagttcccgtgttcttgtcctgagtcagctgagtccagtgggggaaggggaagttgttaaaatgcaagttcccaggccctgccccatagatgctcatggaggaggcctgggtgtggcttagacagacacacctttgtttttaataagtgggattctgataagcacccaaggcccaggaggaagctccaggaacccagtgcagacactccccactccaggccagggcgccagctaccctgctaaaaggtgctgtgatcacttggccagggctttcaaggaatccaagtggctcctctgcacagagaccacacggccgtccaccctccctgagactgatgccttccttgatgagctttccttggaagaaaaacattttccattttccaagagactcacattgaatttcacaaacccagggaagcagaatttacgctgccaccacagccgataagcagtagcatcaatttcttggagaacagggaacttggagggacttggggatatgggaatgtccatcctgaagggagcatgagagatcaatgttacctcatttaatctttgccatggtcatataaggtaaggtctatcgtcaataataggagggtagggcctctgtgggccatgatcagcctgctagctggatggcagagaactgggagcagaaaggaggaggggagagagctggaatgaccattgggattccagagcccagggttaggaccaccgccctttgtaaaaccagccacttagccagttagttgctttgtgtgtcttcaggctaatttaacaaccccatactgcggaactctgggccagagtttggaggaatgtgaagaattcagacgcaactttcatgcagcctctggaaagctcccaggataatggggaaacacacacattcaataacctcaactttcgatggcccagctcagaacactgccagctggaggtaggtggtctggagaaatccagagaccgcctggaggggttggggattgagttccattgcctttgggagggagagagattccacagcccacatactttgcactttagctaaggtcaacccctccacctgtgccgtagatctcatcgtcacttgtttgcttaaggacatagagctagtgatcccctgccttcatctcttttccctctgatgactggattatccctgtcatcatccatactgctatttctcccatctcaaaaacaaggaataataataataataggatggtaaagtgagaactttacctttatattattattagtagtagtagtagtagtatttttttttttatttttgagacagagtctcactctgttgcccaggctggagtacagtggcatgatctcagatcactgcaacctctgcctcccaggttcaagcgattctcctgcctcagcctcccgagtagctgggactacaggcgcccgccaccacgcccagctaatttttgtgtttttagtagagacggggtttcaccatgttggccaggtgatctcctggccaaggtctcgatctcctgaccttgtgatcggcccgcctcagcctcctaaagtgctaggattacaggcatgagccaccgcgcccggcccacttttatattattaaaaaaatataataataatgataggagggtaaaggagtggaagattattgcaggattggactctagttggttcacatcaccttttatctgcatccttggacagtcctctccaaagctgactctgggtttggccatgggacttactttgggcaatgggacagtagcaaataccacacgagcagaagtttggaaaatatttacatttgggggctttttgttccttccgactgggtatccctgcaaccaccaccatatgaacaagcctgagtgaacctcctagaagacaagcaatcctggctctcccagcagaggcctcagcacaggagtgaggctgttcccggaagaaccacccaaccaacacatagaactgtaagaaacaggccaggcaccgtggctcatgcctgcaatcccagcactttgggaggccgaggcgggcagatcgcttgagaacagtagttcgagaccagcctgggcaacatggcgaaaacccgtctctactaaaaatacaaaaataatcatcataatgataataataaggctgggtgtggtggctcacacctgtaatctcagcactttgggaggctgaggcgggcggatcacctgaggtcaggagtttgagacgagtctggccaacatgatgaaactaaaaatacaaaattagctgggaatggtggtacacgcccgtaatcccagctacttgggaggctgaggcaggagaattgcttgaacccggagacagcgttgcagtgagctgagattgcaccactgtcctccagcctgggtgacagagtgagactccatttcaaaaaacaaactaacaaaaacaaaaacaaacaaacaaaaaaagaaaataaataaacagttgctgttttaagccactcaagaaagactattcaaaaggctttcaatcccatggtctaacccatggtcactcacctgtccacccaacctgggacaggtctccactcccaggatgacattgaaaatacttaacatatgagtttcccgcatgtcagaatagagcaagatcttgaaggttcattggtattctcggagtgaaccctttagtggttggaccatggggaggtctgggagcccttggggaagcgcttacttaccaaatggtatggaaatagtgcaatatttaaaccaccagtttggccatacaagtatgtccctacgagtcatcaactctgctggtagcaactatttaacctcccttttcatgtgtggaagaatctaggtgtttttctcctctaaaaaaaggcacctacatattccaagaggttttccttaacacagcccaactcatagccacatcccccgaccacacgacaggtccttaccgggacaccacacaaaaacaagcgtattctcagataatttaatcagaattttaatataaacaggtcattatcccatattttacatgcagaacgatttcaatattccaaaaaaaaaggcgtcttctgtacatggtgctacttggctcttgtaggaaaacattgaaaaaataataattgagctgttggggggttttgtgtttctgagttgttttctgcaaaagctgcagcacatttgatcctgcgttgccaacgcacagggccgaggccacccaggcacacaaagggacgaggagaagcaactttcaggcaaagtgtaaagactaaacaagctgttcctgaatatgtgcatgggtgcacacttattttgaggctcttccttccttctccaatgggaccaagagccccagatttgtgatctggtttttaacaaggattttcagtggcccgcacccagatagaaatttggctggtggctggttctggaccttgactagtatcagaaggtaaaagtaagctcaaaaagccattgtgtcccctcccctcactcccatttctcggggacccttaaggaaatattcaccttccattgcactccctgaaagtccaccatgttcttttgtatgttctaggaaaaaaaaaagtgctgacctgttcttttcattcccaacctcacctcgcatataaattaatattctgaagaacatgctggaagattttctgaagtgacacccctctctgtgtaccatgtatataaaatcggcattccctgttccccatcctcaacaaaaccattgtttctgaagagcctaaggtgtcaaggactcaccaggtgacattcaaaggacatttaaccctaaacttccacccactgtgaaggagagaaatgattagcactgggactacagcacatccatttaccggatgaccagcgcaagtcatatgctgatgacgctcctgctctttcacacgtgttacagcagactacaaataaacacctcccaatccaataagcacatttcttggtggactacctgccctgctaggatacagtgaaagatctgtctgtcagttggtaacatagtccccagggtcacaggatgacctatgcagacccttgtgtcagttcccacagcttctctcaatcatcctcagcctatatccagacaagcagcagtgcttctctttctcactgcttccaatgatgaaacagcacctaggacagctcctaaaacctgaacattttctgatgcgtatttgacatcactgatgcagagagaaagtgatgtgcttggtattctcctcctggaagaaggaactcctgtgtggctttcactacattaatgaaaagggttttaatcatagtgagacatctttaagaacaagcaacaaaaagtgttatcctaagctggttttgttgctttttgttgttgttgttgcaacttaacactacaaactcccaggacaaccgtgtctttctaggaccaaagttttattgttacaaagtcaacatttcctaatgtcaaaggaggtttgcaacccaatagctgtttgctcttttcactgtggcagtagagtcaaataaatgaaactggtgaatcccatttgcaaggggcaggcccagcacaccctacctttctccagggcaggtggagaaaggtgagtctgcaagggcagtgcctaaaagtacaagagcagcaagatttgggccccactggtcctgcctagactctcacatgggttatcaaagctgcacaaggtccaataatatcagcttgaggtcagtcaaaccccaacacagaggtccaaggtgttgttgcaaaaaaaaaaaaaaaaaaaaaaaaagcgttcagcacattaatgggttttggattggaatttccctcacatgctcccatcccacttggagaatttaaaaagacattgcattaggtgtttgtgtgtaaggtgcatcaccagcctgaaaggagtgggcataaaccatcagggagcccagggcacctttgtgctcacttcagggggattccatggaacaggtgggaatgcttgctctgaatcaaagcccgtctttgccccggcagccatctctcaccaaaggaaggtacaccttgctgggttaccccatatatcagatacatcatgacagcctggaacttagtttatgtttggggaacatagtgacaatagatggaggatttttttttaaaggaagattaaattcagagaagaatattaccagccaggaagaaaaggatctatgctcgcataaaggccataccttctccatcccaactccctccctcaaaattcttactggtccctggcattcgaatcagctgatacacacgttccctgattcagaccggttccaggtagaattctgaaatctcaaagatgtccatgattgaatcacatcttaacaatacactgaggtagactgtgctgaaaaaagaaaatcactatcccccattcacctgtttatttttctttgataaaaatttacatgcgctccattttttatgagagtgattttcagagtgattttatatattaaaataaatactttttcccctaatataagaaaaacctttctgaattagaaaaatgtgaaaattgcagctagtgtagtatacaaccactacaaatttactaagaagagaacaaaatacctagttctacgtgttttttttttaaatttaggtacagaccctcatatttacaaaataaatttggcaaaaataatttctgtactcttgcttcttgtacccaatcactgaggctcctcagcaatatttttacatgctgtattttcccgaatcatataaataagatagcaatagacaattgggattcatgtctacctgtgttcttaatcaagaattgagagggcttggaggttgccattatgactctatcccattcttaagcccacaactcttaagagaagaagaaaaggaagcagtcaaaaagttgtaagaaaatgcactcaggaataacgcatgggcgatgattttttgatgaaccaaagtgatgagttcactgtgttctttgagcagctgtggtggttctttttgcaaagagaagaaacggtggattcacgcccattcggaagttcttggtggtgtgtaaggtctttttcacggtttctcctccagactctactctcttagggattgcaacactgtaagcacctgagcattcagctcaggcaccacacctggcccagatgaggtcaccgggctcagagcagcttccgggagttcagtactgaggaccgtcagatgctctcagggtggaggggaccaagacgtactctcagtgcacctctctcttacattgcttagatgttcccaaagtccatccaggttgttgtgctttgggatctgacgttcttgggtttgcacaataacggttaggatgttcacacccgggagaggaaacgccacaagaggtacacacagagaatcagaggatgaacacaggtgttcttgaaggcaggctcagagctaggtagctaccagcttatccgaacaggaaccttccagcagacctggtacctgaaccagaccatccataaaacctagtctctcacacactccacgtggcctcacaacatccaaaagtgttagcagcgaacatggcttcattcccagaaatggatgcctttaagaccaaacaaagaggccacttgtgcctgactccctccccttcccggccccacaacaggcagaccaactcatgtccccactccccgccaaccccggggaatagtcaataacttatgaggctaataccagagactttaaaaattaaatatggtacaaatatattctcaaaactctgtcatctcagttctttttttttttcctttttccattttgttttttctttctttttctttttttttttttaatgtcctagcttggtttggtcttgaaaagattcataatcactccaaatgaaatgctcctcccttggccaccaatgtgaagggagggtagaaacctgaggctagacttctgacacaagaagaatctgtcgagagcacagtctcccagtcaataagaaggaaggagagagggggatgagctcgcacccttgagaagaaccttcatgagccaattcccaaagcatcaactccgcatggatactttgcacacacatcagccgtgtctaatggacacacacacgtgcatacacacgtgagcacacgccgggaccacagacccttatccaaaatatgaaagcagcagctattggtcaatttgaggaactcattttgtaaagaaaaaaaaaatccttcagcctggatgagagaaaaaaaaaaaaccaaaaaaaccatcttgaagctcaacctgtaaaacttgaaattctcctggaacagggctgggtgtttttgttttgttttttctttcgaacttttgttccacaaacaggaagttttgtcttttatactgaagctcagacaccagcaaaaaaaaaaaaaaaaaaaaagaatttgtaaaaacaggtgctttctttccatctgctgggggcgggtggggggaacgaaaaaacacaaaatcctggtttgaaaccgtcgttgccccaaaggagcagcaactgtggaaaccccttgccctccaggttcacagttaaatcctctgcaggactagttaaattggtaaccaaacgagtccaccttaagatgaacagaaatgtataggaacgatctctgaactccattggacatggtagagtcgtgagaatcctgagttttccagaggctttcaaaccagaggaaagcgaaaatgggaacccctgcccgcccccgccacggtaggcactgttaggaaggattggaccgaggcaaggtcagaatccgcccgtttttcttgcctccgttcatgtgtgtgtaagggatgtgttcctcgtagctccgcttgaaacccagcgaggaccctccatcccggccccccgcctcctccctctgacagtgcgaggaacggtccaggggcacattctccatgtcctcaaactccatctccagctcctcactctcgggagccttgttctcctcgctgtggaagaacgacacctctggaaagctggggtgcaggtcgtccttgagcaggttgacaatctccaggaaggttggcctcatcttggggttgaattgccagcacatgcgcatgaggtcagtgctgcggggcagaaggacacgtcctgggtgagtctgggggccctgccacgcatcctcccaaacccccactcttgtccctgcagccgacacccacggaccacatgtgctcacatcagatgctggctgtgtgtgtggacaattgtcaaggcagaaatagcattgctagaggtgctgagagatggtgttttctttttgcttttcttcttcttattttggacacagcgtctcattctgtcacccaggctggagtgcagtggcatgatcatagctcactgcagcctctgcctcctaggctcgagcaatcctctcaccttggcctcccaagtagctgggaccacaggtgtgcaccaccatgcctagctaatttttgtattttttgcagagacagggttttgctatgttgcccaggctggcctcaaactcctaggctcaaatgatccacccaccttggcctcccaaggtgctgggattacaggtgttagccaccatgcctggccgcttttttttttttttgagacagggtttctcactttgtcacccaggatggagtgcagtggcgcaatcatagctcattgcagccttgaactcctgggctcaagccatcctcctgcctcaacctcccaaagtgctgaggttccaggcatgagccatcctgtccagcctgaaagatggttttgaaaagggattcctcatttcaaaactggctcaagagtaatcccagcactttgggaggttgagccaggaggctgagtccaggagttcaaggttgcagtgagctgtgattgtgccactgcgctctaccagcctgggtgacacagcgagacttcatctaaatatatatatatgtacatatgcatatatatttggaggggggaatatataatatgtatgcctgacaaaatttttgtgtgtctgtgtttgtttttgagacagaatctcactctgtcacccatgctgcagtgcaatggtgcagtctctgctcactgcaacctctgcctccccgattcaagcaattctcctgcctcagcctcctgagtagctgggattacaggcgcccacgaccgcgcctgggtaatttttatatttttaatagaggcggggtttcaccatgttggccaggctggtcttgaactcctgaccttaggtgatcgttcacctcggtctcccaaattgcttgggattacaggcgtgagccacccatgcccagctacctgacaaaattttaagtgtataaagaattaacaggcggctgtaatcccagcactttgggaagccaaggtgggtggatcacgaggtcaggagatcgagaccacggtgaaaccccatttctactaaaaatacaaaaaaaaaaaaaaattagccaggcgcggtggtgggtgcctgtagtcctagctactcgggaggctgaggcaagagaatggtgtgaacccgggaggcggagcttgaagtcagccgagctcgcaccactgcactccagcctgggtgacagagcaagattccgtctcaaaaaaaaaaaaaaaaaaaaaaaaattaacaggcaaacaggtctctctcccccaaccccaggtctccagttcccttctcccaagataactaccgctataggtgttttgtgcaaccttccaaagatacaatatgcaagaaaatcatatgatttgtgaacacaagcaggcaggtaaagacataatatgtaaacatgtgtgcttataatatgtaaatgaggtgtacatgtgccatgatatgctgatgcacacagaaacatataatatgcaaacataaatacctatgtaaatatataatatgcaaacgtaagcgtacatgtagcacatatgggaactcaagtgtgtgtaccacaatgcaatatgcaaatgcaagcatgcatgtaaagacaagctatgcaaacacaaacacacctgtaacatacagcatgcaaacacggtgagcgtgtagacataggaaaggcaaaaccaagcacacgtgtaaagggcaataccctttcaacgaacacctcacacaccttaaaccctttctacacttacactctctctggacagttgtcgggttgatccagataccctccatccatgacaaatttcaacacctgttcattagacaggccttggtaaggctgttctgccaagctggtgatttcccaaaggaccacgccaaaggacctgccgatgacagttgatagtagtaacaaagaagccatttagacacacacacacacgcgcgcgcgcaaacacacacacgcaaacgcacacacacacgcaaacacacatgccaacacatacatgcaaacacacacatgcaaacacacacgcacatacacgtgcacacacatgcaaatacacacaaacacgcatgcgcacacatgcacacacaaatatgcaaacacacaaacacatatacacacacaaacacacacacccaaacacacacacgcacacacatgcaaacacacacaaacacacatatgcacacacatacacacacaaacacacacacaaacacatctcttggtttctagaacatggttagccacttaataaaacaattcatgctgcagttcataaatgctgtgaaaggaaaatcaatttggggctcccaaatcactaaactcaaggaaaaagtccagctaggaactgcttggacaaacctgcttcccattctattcagagtccccactctgctcactgagatacctgcatatctgattggctcctttggagaggcgcatcagaaactcaaaagaatgcaaccatttgtctcttatctacctacaacctggaagctccctccccacttcgagttgtctcgtctttccagaccgaaccaatgttcatcttatatatgttgactgatgtctcatgtctccctaaaatgtataaaaccaaactgtgctctgaccaccttgggcacctgtcctcaggaccacctgaggctgtgccacgggcacacgtcctcaaccttggcaaaataaacttcctaaattaactgagacctgtctcagattttcggggttcacaatgcctacaggattagtcaggacataagagtagccgtgggaagatcctaagacaggacgctgccttcctttccttgatggggcgtccaggaggatggcaggcttccttcccccgctcttggctctcactagcacctggaattcaagcccagcgtccatccacccatccacacacaactcaccacatgtcagaagaagtggtgaagaccccatccttcagggactccggtgccatccaccgtacagggagcagacccttgccccctttccggtagtaatccgtttcatagatgtctctggtcattccaaagtctgacaacacaaaaggttcacacgctcttaaccttcagccttggtcctagcatctgccaccttgactgccccacctctcacagagccctaagaggggttcacctggcccacgtctgcgctcacctgggtggtggccaaatccagtaagaatggattctgagggtacgcatggggaagtgaagggggaagatgggctactgtttaaagggagggaaaagaaggtaccaaatcacaaagaagctacatttttctttttttttttctttgatatggagcctcactctgtcctccaggctggagtgcagtggtgcaatcttggctcactgcaacctctacctccctgattcaagcaattctcttgcctcagcctcctgagtagctaggattacagctgtctgccaccatgtctagctaatgttttgtattttgagtagagacagggtttcaccgtgttgaccaggctggtctcgaactcctgatctcaggtaatctacccacctcagcctcccaaagtgctgggattacaggggtgagccaccgcacctggccaggagatgtctttttgagtcataaatagaatcatatcacttcctgctgccccttgctaatgtaagataatgtcgagatgacttgctgtgacacgcaaggtccttctgggtctggtttctgcctctctcctcatcctcacatctcacgctgctctggtcccctctatattccttttttatttgttttttgaaatagcgtctcactgtcacccaggctggagtgcagtgatgctgtcacagctcactgcagcctccacctcctgggctcaagcaatcctcccaccccagcctcctgagtagctgggaccacaggtgtgcaccaccacaccccactttttaaaaaatcttttcaaggagatggagtctcactatgttgcccaggctggtctcaaactcctggactcaagcagtctttacacattggacttccaaagcactgagattacaggcgggacccccggtcctacaaacatatcttttaaagaagtgaatgggtaagtgagtttatcaatacatgcaattaaatgacagctggtggggggtccccatccaaaatcttgcccagccaggcacagtggctcatgcctgtaatcccagtgctttgggaggccaacacaggtggatcatatgaggtcaggagtttgagaccatcttggccaacacagtgaaactccgtctctactaaaaatacaaaaagtagctgggtgtggtggcgcacgcctgtaatcctagctactcaggaggctgaggcaggagaatcgcttgaacccaagaggtggaggttcagtgagccgagatcctgtcactgcactccagcctgggcgacagagcaagactccatgtcagaaaaaagaaaaaaaaaaaaagccggtgcagtggctcacgcctgtaatcccagcactttgggaggccgaggcaggaggatcacgaggtcaggagatcaagactatcctggccaacatggatgaaaccccatctccactaaaaatacaaaaattagccaggcatggtggcgcacacctgtagtcccagctacttggaaggctgaggcaggtgaatcacttgaacctgggaggtggaggttgcagtgagctgagatcacaccactgcactccagcctgggcaacagacagagtaagactccgtctcaaaaacaaaaagacaaaacaaaacaaaaaaaaccccacaaaaaaaaaagaagtatcttgcccctttatattatcagaaaagacttaacggctcattatagacaacttccttctgaaatcaaacctggcctgggtcgttatgttttcaaagcagaaagccagacgaacctccaattttgacagtaaaatcatgggcgaccatgcagtttctcgctgccaggtcccgatgcacaaacttcttggcgttcaggtaggccatcccgtcagcaatctctgccgccatctgaatcatctcttgaagggtagggggagggcggccaggattattctaaaacagaaacacggggttggtgtttcagcagcactgggatccgaggaggccaggagcgggtgctccaccgagtaccccgctgggtcccccgaagcagcttacctcagcctctggccgcagagaacggaggtagctcttcaggtctccgtgagccatcagctccatcaccaccagcgtgggctggcccttggacaccactcccaggaggcgcacctgcagagcaagcaaccagggttcttggaggagggtccgtgattcgactcaccagggttctcctccctccctggtgtctatgtcacacacagcaccctgtggcctggatgcagcgtgctcagccctggtctaggagagcagacatacctgcccggacagcagacagataggcctttgtatttttttttttttaattttcgagacggaatcttgctgttacccaggctagagtgcagtggcgtgatctcggctcactgcaacctttgcctcccgggttcaagcaattctcctgcctcagtctcccgagtagctggggttacaggtgcccgcctccacacccggctaatttttgtatttttagtagagacaggatttctccatgttggtcaggctggtcttgaactcctgacctctggtgatccgcctgcctcagcctcccaaagtgctgggattatagccactgcacccagccaggcctttgtattttaatcattccctctgcctggctctctgttccctgccacatccacagggcccagctcctcatgtcctctaagtctttgctcaaatacacccctgtccaaccctcctttcctccctttcttcatgtttccatagcatttgctcctaatgtataaagggtttggagtcagctgggggtggtggcttatgcctgtaatcccagcactttgggaggctgaggccggtggatcacctgaattcaggagttcgagaccagcctggccaacatggcgaaaccccatctctactaaaaatacaaaaattagctgggtgtggtggtgggctcctgttatcccagctactcaggaggccgcggcaggagaattgcttgaacctgggaggcagaggttgcagtgagccgagattgtgccactgcactccactctgggcgacagagagagactctgtcttaaaaatatataaaaataggctgggcgtggtggctcacgcctgtaatcccagcactttgggaggccaaggcaggcggatcatgaggtcaggagatcgagaccatcctggctaacacagtgaaaccccgtctctactgaaaatacaaaaaaattagccaggcactgggcgtggtggctcacgcctgtaatcccagcactttgggaggccaaggcgggtggatcacgaggtcaggagttcaagaccagcctggccagcatggtgaaaccccgtctctaataaaaaaaagtataaaaagcattagctgggcgtggtggcaggcacctgcagtcccagctactcgggaggctgaggcaggataattgcttgaatccagcaggcagaggttgcagtgagctgagatcatgccactgcactccagcctgggtgacagagtgagactccatctcaaaaaaaaaaaaaaaaaacaatcagccaggcgtggtagcaggcgcctgtagtcccagctactcgggaggctgaggcaggagaatagtgtgaatccaggaggtggagcttgcagtgagctgagattgtgccactgcactccagcctgcacaacaaagcgagactccgtttcaggaaaaaaaaaaaaaaaaaaaaaaaaaaaaaaaaaaaaaaaaaaaaaaaatatatatatatatatatatatatatatatatatatatatatatatatatgaaataaaataaaaataaaggttttggagtctgtctccgcctgctgttttggaagctctacaggggcaggtatccactgtatcacagggacaagagcagggctttaaatgccccataaatatgtgtggcaaggatgaaagcacataggactcaaagaggaacaaaggagcagaaaggcaggaagagttggtgctgccttcaaaggagagtaggaacgagggcaggtggtatcaggtggacctctatgtggtcctgggttacaaaggtgccaggaaaaagcaagaaatggaagagtctaaaaagcaatggaagattgtggaaaatgatggaagattccggaaagtggtggaagattccagaaaatgatggaagattccagaaagtgatgaaagattctggaaagcaatgaaacattccagaaagtgatgagacagtgatagagtctggttccaggcgaagtgggagaggatgggatttgagaagggaatgatccctcctcacacctctaggatgggaagcttagtggagtgaggggtgggtaggaggttacaccctgtgtcctctgtcgctctgtgcaggaggaggaggcagagaaagggaagggtcaggaaagccagcccatgtcccacccccactggactcaccacgtgatggcaggtgaagcccttcatgaccgaggcctcattgaggaactcaatccgctctcggagactggctgactcgttgaccgtcttcaccgccacgcgggtctctgcctcacccttgatgatgtccctggcattgccctcatacaccatgccgaaggagccctgccccagctctcgaaggagggtgatcttctctcgagacacctcccactcgtccggcacgtacacagagcatggaaacactacttcttacttatctacacagcatccttggaggatcccttgggggtctgcagccaccttccacccaagccctcacccaaaccccctcgaaaacactcatgaaatgagttctgtgatccaggacccatgccgggcactgggcatatggccgagaacaggacaggcatctgcacccatggagagggcatggcagagactcaaggaaggagccacaactggtccaagatcctggccaatatgtcctgaggcaaacctgcatccccatccttcttgtctgatttcagacccttgctatggaatgatgctacttcccacctgagactactgtttctgcaaagtgccaaggggatggaagacaggttgtaataggttggggaaaaaaaaagccaggatacttggagctcttcccatgaaaaggtggagtctatctcaccaccccttggccctgggcatggccttgtgagttattttggtcaatgggaatcaacaagaattgtccaagcagagatttggaatggactgttgccctggagcttgccctggagctttctactaggaaccaacagaggaccatggaatgaagcctgagccagcctgctggagcctaagaggctagatggacagagtgaggctcagcctcccccagcttagggcccccaccttgggaccacccagcctactgaccaccagacatgtgagtgaaatcatctaagactaccgagtgctagctgacacaccagcaaaatgtagctacatgggtgaagccaggcaagaccagaagaactgcccagctgagcccagcccaagtggtcgaccctgcccaagggtcccagaccggctagatgagcccattcaggcaggtgccaaataccatgtgtccagatgcacacagtaatgaggtttctgcagcaagggcagtttggcaagctcaaatgaataagagggcttttcttggcctccctggggaacccatccttcactctcactcaatggtgaaggcaaaggaagctgatgagtagggttctggccacccacagggaagggatggtactcaccatcactggcactgagatactcagggtttgaagaagcgtaaagcggtcccagcggcccatctggctgcctggaggaggaaaacgaggcacgttagcttgagattctcatgggactctgcagaaaggtgtttcatacaagactccccaaggcaaatggcagcccttaccagcagaatccccataatcctagatgcagtctagggcagggatgggggacctttatgttttgaatggaagcccatcagacaggtatgtaagtgcatcaacatgggagcactcatccctccctgggtggttttttttttgttttgtttttgtttttgtttttacatttcagagttgcagtcttgctctgttgtggctggagggcagtggtataatcatagctcactgcagtcttaaccttctgggctccagagatcctcccacttcagctttctgaatagctgggaatacaggtgctcaccaccacacctggctaatttgtaaaatttcatatagacagggtctcactatgttgcccaggctggtcttgaactcttggtctcaagtgatcctcctgcctcatcctcccgagcggctgggactacagatatgcacgaccatgcagggctctggctggctttttaaataatttatggccatccatgtaacacttaaaagccactcacccagtactgttctagagcgagctcatcccgactgatgagaaacaattattaaattttcaggaaactagtgagccagttgttaaatacaagcatcattaaagattaaattgtacaatgccttccaaatagaacaaaaaatataaattatagaggcttacaattaaataaattatcctaaaagcaaagacaatacatgttcaaaactcatcacttcctaactctcatactacatttaaatatgatcaatgcagttgaggttatttacattatatcatttatacaccatattgtatccatagggtggattcaatggggagctattatgtatctctttctaacactgcactcagtaatattatgtctacagcttgaatttagacatcctgggaatatttacattacagaaactggcaaatgctataactcaggactggatttgttgttctgttgtttgtccaggcttgagaaagtgatgagaaaaatatttttttgttttgttttgtttttgagacaaagtctcactctgttgcccaggctggagtgcaatggtgcgatctcggctcactgcaacctctgcctcctgggttcaagcgattctcctgcctcagcctcctgagaagctgggattacaggcgcacatcaccacaccttgctaatttttgtatttttagtagagacggggtttcaccatgttggtcaggctggtctcgaactcctgacctcatgatccgcccgcctcggcctcccaaagtgttgggattacaggtgtgagccaccgtgcccagctgagaaaaatgtttaatcatgtagattaaacttaaaagcgtgtcatgtctgcaactgtgatgttgcatgtggcacaaaatgttcttctgatatttaaaaattaccatctgactcagcaaagacgtcactcatatcactgatgaacatatatgtcttatttcagttttgtcctactttttttttttttcccgagacggagtctccctctgtcgcccaggctagaatgcaatggtgcgatttcagctcactgcaacctccgccaccagggttcagtaattctcctgcctcagcctcctgagtagctgggattacaggcgcccaccaccatgcccggttaattttttagtatttttagtagagacgaggtttcaccatgttggccaggctggtctcaaactcctgacctcaggtgattcacccgccttggcctcccaaagtgctagcattacaggtgtgagccactgtgcccagtcaagtcctactccttaatgtaaattttgaaaaattaatcaacattcacattggagctttacttgtttatcaattgcaataataggttagcttcggatataaaggtttgggcaaaaaaaaaaatcaataaaaacattctgtgagaatcaactgtctagagggaatttacaataaagagttgtgtatatcatattatgacaattatctgtaaattgcatgttacacatcctatatcagcaaaattcataataaacttaaatatgcctatacctatatcaaggcatgttttcccccagagaaccaactgttcccagcacaccactgaactcactgaactcacctctttctcaggaatagataaatacttccaatcacaacactgaagagaaagacaaagatgagggggccgatgataatttttgcaatatttgacgggacgtctactgaaatagaataagaaaatatatgtttcatatcaatgtgtttccaacaaagttcacatcaaaaatcacatccactcctggaatgggtgggccaccctgttccttccctcccttgtccataaacctctctgctgctcttccacatcctgattttccagcagtcccgaaacagtcccgtaggtgcagtgggaccaggcagtgggctcagaggtcagtattctggaagcacactcttccccacccctgccccaaatcactgctcatttccatccctcccacatctcaggcagtggatgcaggacccttttctgtcagtttaatgctctgctgttgcccctctgaaatgcttattcattttattttaatttttatttatttacttatttttgtgacagagtcttgctctgacacccaggctagagttcagtggcacgatctcggctcactggaacctcctcctttcgggttcaagtgattctcctgcctcagcctcccaagtagctgggactacaggcatgcaccaccacacccggctaatttttgtatttttaatagagacagggtttcaccttgctggccaggctggcctcaaactcctgacctcaggtgatcctcccgcctcagcctccgaaagtactgggatgacaggcgtgagccaacgtgcccggccaaattcttaataattttaaagcaaggagttctgcattttcattgttcactgggtcttgcaaattacatagctagtcccgatcccagcatgacttttgacagatgtaaacttcttttaatttttattttttagagacagggtcttactctgtcacccaggctggagtacagtggcacaatcacagttcaccgcaacctcaaattcctgggcccaagtgatccccctgtctcagcctcccaagtacctgggattacaagcatgcaccaccatagctggctaatttttgtatttttttgtggagacagagtctcgctatgttgctcaggctggtctctaatgcctgtcctcaagcaatcctgttgcctcagcctcccaaagttctgggattacaggtgtgagccacctcatctagccaaaaaactctagtaacaaagatggagacactagcaacaggtgccaggcacttaacatttgtgtcattaaaatgtccctccacctcctgaagtggttctgttattatctccatgtacagatgaggaagtgcaggattgccagataaagaaaatgtgatacatacacaccatggaatactacacagccatgaaaaagaatgagatcatgttctttgcagcaacatgaatggagctggaggtgattatcctaactgaattaacacagggacagaaaaccaactacctcatgttctcacccataagtgagagtgagacactgaccacacatggacagaaagaagtgaacagtagacaccgggactgctatggtttggatctgtgtccccacccaaagctcttgttgaaatgtaatccccaatgttggaggagtggccgggtgggaggtgattggatcatggaggcggtttctaatgggttagcaacatccctactgggtactgtataataagtgggttctcatgggatctggttgtttaagaagtgtgtagcaccatctccccgtcttaacaccttgctcccacttcaccttccaccatgattgaaagtttcttgaggcttcctcagaagctgagcagatgccagcatcatggttcctgtactgcctgcagaactgggagccaattaaacctcttttctttataaattactgagtcccagtctcagacctcttcctcttcctctctctcttctcttctttctttttctttcttttatctctctttttctctctttctttccttttctttctttttctttttcttctctctctctttcactctttctttcttttttattttttgagacagagtctcactctgtcacccaggctggagtgcagtggcgtgatgtcggctcactgcaacctccgcctcccgggttcaagtgattctcctgcctcagcctcctgagtagctgggactgcgggtgcacaccactatgcccagctaatttttgtatttttgggtagagatggggtttcaccatgttggtcaggctggtctcgaactcctgacctcaagtgatccgcccacctcggcctcccaaagtgctgggattacaggtgtgagccactgtgcccggccaggtatttctttattgcagtgtaagtacagactaacacaggtgcctacttgagagtggtgggtgagaagagggaaaggatcaaaaaacgacctatcaggtactatgctgattacatgggtgacaaaattatctgtacagcaaacccccaacaacacccaatttacttattttattttattttttgagacagagtctcactgtgttgcccaggctggagtgcagtggcacgatctcggttcactgcaagctctgcttcccgggttcctgaggctcctgcctcagcctcctgagtagctgggactacaggcgcccgccaccatgcctggctaatttatttttgtatttttagtagagatggggtttcaccatgttggccaggatggtctcgatctcctgaccttgtgatctgcccgcctcggcctcccaaagtgctgggattacaggtgtgagccaccgtgcccagccacaatttacttatataatgaactgcacaggtacctctgaaacttttttttttttttttaagtgcaggatcaggccaggcatggtggctcatgcctgtaattccagcactttgggaggccgaggcgggtggatcacttgaggtcaggagtttgagaccagcctggccaacatggtgaaatgccatctctactaaaaatacaagaattagccgggcgtggtggtgggcacctgtagtcccagctactgtgaggctgaggtgggagaatcacttgaacccgggaggcggaggctacagtgagctgagattgtgccagtgcactccaaagcaagcctccatctcaaaaaaaaaaaaagtgcaggatcaaagagggcaagcaccgcagcagctgataggcctgagagtcaaggccagggccagcacctgcggcctctccaagtcatcccctgcaatgtcccaccatgctcagtgctaagcacagccccagtcagctgaggctgccatggagacttacaatagtctgtcacgtagaaataggtgggttccgtccaagagccgttgcccgcaagggaggtggcccggattcgcacgctgtagttccccggtgacagcccacgcagcctgcagccccgttccagagcgaagtgcttgcgggagacgcagagatgcagctcctgggaggaagagaggaggagaaggagggtggctgagctttgcacatctgggagtgtccacccctcgcagggagctcacagccaggatcctgctcagaaatgacgccaaggcagcaaagcacagactaagacacataagcgactttgagaattgcagaattttataaccatagtgctatggataaagatatatgcagaggttatcattatcggtaagagccagacttcctaagccagaagctgagcattaaaccctgatggtttcttttcttttccttttttttttttttccagacggagtttcactcttgttgcccaggctggagcgcaatggcttaatctcggctcactgcaacctctgcctcccgggttcaagtgattctcctgcctcagcctcccgagtagctgggattacaggcgctcaccaccgcgcctgcctaattttgtattttcagtaaagacagggttttaccatgttggccaggctggtctcaaactcctgacctcaagtgatccgcccacctcggcctcccaaagtgctgagattacaggcgtgagccacagctcccagccctattatctattttctattaatattaatttccataatattatctttctaaaaatcatttgttttatttttaattgacaacagtattataggtcaggcacagtggctcgtgcctgtaatcccagccctatgggaggccgtgaagggaggattgctggagcccaggagttagagaccaacctgggcaacatagccagaccccatttccacagaaaatagaacaattagccgggcacgatggttcgcacctgtagtcccagctactcaggaggctaaggcggaagaatcacttgagcccaggaggtcaagggtgcagtgagctatgaaggctccaccgtactccagcctgggtgacagagctagaccctgtctctaaaataaataaacaaaaataaaaataatagttgtgtacacgtatggggtacagtgtaaagttatgttacagtataaattgtggaatgattaaaacaagctaattaaatcctcatcacttcatgtacttatttctttgttgtgagaacatttaaaatctattcttctagccattttgcaatatgtgttattagctatagtcaccattcatctacagagcagtggattcctagaacgtattcctcccatctgaaactttgcaccctttggttcacgtctctccttgtttttcctttaatcattttaaaatgcaaaagtgggcagggcgtggtggctcatgcctgtaatcccaatactttgggaggccgaggtgggcggatcacctgaggtcaggagttcgagaccagcctggtcaagatggtgaaacccccacctctacccaaaatacaaaaattagctgggcatggcggcacacgcctgtaatcccagctacttggagggtgagacaggagaattacttgaacccaggaggtggaggttgcagtgagccaagattgtgccactgcactccagcctgggtgacagagcaagactccatctcaaaaataaatacataaataaataaaatgcaaaagtgactcctagctcacaaatcattagaaatcaggcagcaggccacatttagcctatgggatatagcttactgactgacccctggtttaagagattatatggtttgtccgagatctcatagctgcaaagtggcagggccagctcttgaactcagaactgtctggctctacagctacttgggaggctgaggcaggagaatggcgtgaacccgggaggcggagcttgtagtgagccgagatcgcgccacttaagtccagcctgggtgacagagcaagactccatctcaaaaaaaataaataaataaaaagaaagaaactaaaaaaagagaactgtctggctctagaacttctccttaagaccactgcagaatatttttgccatgtatccagcaaaattagaaaagagtggaaatgaaggatctgcagggcctatgccagatttcctgcctttccctgcaactcccagcctctgtcacatcagaaccaaatggataaatgtgcttaatgtctaaggacaaataaaaaagctctttctttgccacggtgctgcctttcgatttttttttttttaatcattataaaaacagttgaagcccgggcacggtggctcatgcctgtaattccagcactttcaggggccaaggcgggcagatcacgaggtcaagagattgagaccatccttgccaacatggtgaaaccccgtctccactaaaaatacaaaaattagccagttgtggtggtgtgcgcctgtaatcccagctactcgagaggctgaggcaggagaatcacttgaacccgggaggcagagtttgtagtgagtcgagatcgtgacactgcactccagcctgggcaacagagcaagactgtctcaaaaagaaaaagaaaatgtggtatactttgcctcaaaaataaacacataaaataaaataataaataaataaataaaacagttgggatccacccaaatggagatttgcaaagtgggaaacataccctgtgataagcacgtaactagagataattccagaacttatgagaagagacaggaggctcttgggaataagaccatgaaacctgcaagcatcgagcccaaaactctgaaaagttttcgacacagttccaagctaatagtgcatgcagagaaccgggctggaacatttaggaggggggtggagagtggagaagagaaagaaatgttaaaaaaaaaaaaaaaaaaaaagccaacaaccccatgcttatcgtgtgacaataacagcaagaaaacaaatcagtctggtggcaggggtgggggcagggaactccagtccaaagtttcttccaagtggaatgagtcaccgagtagagagggacaaataagcaaatatagaaacccaaggtagctgctatccaggacaaaggggaaatgcatcttctttttttttttttttttttttttttttggagacggagtttcgctcttgtcacccaggctggagtgcagtggcatgatcttggctcactgcgacctccgcctcccgagttcaagcgattctcctgcctcagcctcctgagtaactgggattataggcgtgtgccacaaagcgagactccagcctgggcaacaaagcaagactctgtttgaaaaaaaaaaaaaaattatctgggcatggtggcggatggcgggcctgggtgacacaccatgactctgtctctgaaaaaaaaaatttttttaacgggagatactgaaaatgcaattaaatagctagaggtggctttgtttatgaaactagcaaaagaaaaaaaaaataccttccaccagctgggcacggtggttcacgcctataatcccagcactttggaaggccgaggcgggcagatcacgaggtcaggagtttgagaccagcctgaccaacatggtgaaacctcgtctctactaaaagacaaaaattagccgggcgaggtcgtgggttcctgtagtcccagatactcaagaggctgagggaggagaatcacttgaacccaggaagcggaggttgcagtgagccaagatcgtaccaatgcaccgtagcctgggctacagagatagactccatctcaaaaaaaaaaaagaaagaatgaaagaaatgccaaactctttcctaaagcagctgtgccattttatgttcccaccagcaatgtatgagggttccgatttctcctcatcctcaccgacacttgttattgtccgtctgtttgttttttgccacgctcgtgggcatgaagtggtattgcatcgtggtcttgatttgcatttttgtcatggctaatttggggctgagttttgtgttttgccctggtaccaggctggggttgagagtgggaggtgagagccactcaagggtgaggagcagattccagaggaagttcggggcattgttgacagcaagaatacagattctgcagagtgaacaatgcccgtttccactgcagaccctccttgattttttttctgcttctgtgtccaacttgtccccatttgcccagaactttctgagtgtggacattgaaaatctcacatcccagggagccctcagtcctggctaaacctagacaactggtcaccctgttggcactggatttaactcgaatcctaacttctcctagcttcttcccatgcctttgactggcccgtgtctcctgttcctgggacccaagggtcactattaggaattcccatcacgaatccccaacagcctctgccccacacagcacaaccccaatcccacccagaccaactgtgttcaccctagagagaagcagagatgggggagaaaatgaaaggagaatgtgaggttacagtcaccttcttaagaaccttttcatagacacatttctgttattgccaacaatgtccttaattacctagcattgctttgatcaagaaaaaaagtgatgtaaaactttatttatttatttacatatatatatatatatatattgagatggtgtctcactctgtcacccaggctggagtgcagtggtgtgatctcggaatcactgcaacctctgcctcccgggttcaagtgattctcttgtcttagcctcccgagtagttgggattacaggcgtgcaccaccacgcccggctaatttttgtatttttagtagatacgaagtttcaccatgctggccaggctggtcttgaaccctgacctcaggtgatccacccaccatggcctctgaaggtactaggattacaggcgtgagccactgctcctggcctaaaactttatttttatgtgcacaatttatactgttggagtgtaattttactccatttacaaaattctctctagcatgtggtgggagtgaatattatggtatgtaagttacagctcaataaagctgtttctaaattaaaaaaaaaaaaaaaatccctcatgcccaagccaatcagcatacagcattcctctggtcacatgattgggcactggatgtcacatgacctcagtctagctgggaatgctgggatgcactctgtcttcctctgggtttggcactgcaaagaaatgaggtttggaaccactacaaccaccggtggacaaccaggggctactgggctcactgccaggagccgttaagatgcaactgacccaggctaggcatggtggctcacgcctgtaatcccagcactttgggatgccaaggtgggtggattacctgaggttaagagctcgagaccagccaggccaacatggtgaaacctcgtctccattaaaaatacaaatattagctgggtgtggtcgtgggtgcctgtaatcccagctactcaggaggctgaggcaggagaatcgcttaaacagggaggcagaggttgcagtgagctgagactgcaccactgcactccagcccggatgacaggatgacagagtgagtgagactccatctcaaaaaaaaaaaaaaaaaaaaaaaaaagatgcaaccgacccaaaggaatcctggatccagccatgtgagaagctcttcagttgttcaactctgggagctaagaagcttttcctctatcataagctagtctggatacagggggattcctttttcttcttttttctttttctttttttttttttttgagatggagtctcactctgtcgcccaggctggagtgcagtggcgtgatctcggctcactgcaagctccacctcctgggttcacgccattctcctgcctcagcctcccaagtagttgggactacaggcgcccgccaccatgcccggctaatttttttgtatttttagtagagacggggtttcaccgtgttagccaggatggtctcgatctcctgacctcatgatccacccgcctcagcctcccaaagtgctgggattacaggcgtgagccactgcacccagcagatacagggggattcttaactgctgggggataacaacacaaacgaactaaactccagagcatgtaattttaacttctacattacactgaacaaaggtcatcccaaacattttatcttatttttttggagacagagtcttcttgctctgtcacccagtctgcagtgtagtgagtgagtcacagcccactataacctggagctcctgagctcaagcaattctctcctcagcctcccaagtagatgggactacaggcatagaccaccacacctagctaattttgaaattttttttttgcagagatggggtctggctgtgttgcccaggctcaaactcctggcctcaagcaatcctcccacctcagcttcctgagtcactggaattacaggcatgagccaccatgcttggcccccaaacatcattttcaatggctcttcatccaccaattctatggatgcaccgtcttccatgtgtccattctccaatggatggacatcttagtggtttgcatattttgctactgatgaaaatcttatgcatagagctttgttccctgccccaaatttgaattatttccttaggacctacaggattaatacatataggataatatattaataaactttgcaattatggcccccagggaatcatgactttctgtgtctatgagactctggaagcctcagtatccagctcactgagatactcagaggatgtattgtacttcctcattctgggcttagccatgggctcactttgccaaagggacactagcaaatgtgatgcaaacagagtcctaagaagtgtttgtatatggggcatgtccttccttgcctgggctagctcactgggcagtgagagaacacatgaggacaaagctccaagtgcccccagctgaggccccagccatgtgaatgaggccatccagccccagccaaactggcccaggacaaaggaatcacccagtgaacctgcagaattgagagaaagaataaatgtcctttgttttaaaccagtacctttgggggcagtttgttacgcagcaagaactgactgaaacaataactaaagctgtcaatccaaaaagctaaaatggtttccagataaaattagtattacctaacatggtaaaaaccagaggcaatccaaatccccaaaaataaatgataccccaatcatgagattaaattctatctagcaactacaaatcataattccaaaggctattgtggacagagacatcaaaaggcagaggaaagtaactcatgaatatggattagaggcatatgcacgtttctgccaattaaaaactagctgagctctgtatgataaggaattttattttaaaaatgaatattaaaaaaggcaaatcaagccattcatttagcaattttattttaaaaatgaatgttaaaaaaggcaaatcaagccattcatttagcaaacagggccccaaaataggcccagaatgacaagttcagtaaggacactttctatttttgaaagtttactttttctgtgaagctgtgaagggccacatatagtctctgttgcgtattcttttttttttttttttttttgagacagagtcttgttctgtcgcccaggctggagtgcagtggcacgatcttggctcactgcaacctttgcgtcccgggttcaagcaattctccctgcttcagcatcccgaggagcagctgggattataggcgcccaccattacgtccagctaatttctgtatttttagcagagacggagtttcgccatgttggccaggctggtcttgaactcctgacctcaaccctgttgcacattctttacaatgctctgcaagccagatttggcccacaagccacaataatttagaattagatctcaattgtaaattattgtcaaagccaaaatctttggttgccaagagtagatgtggtcccaggaggggtagagggaggtccacctggttataggaggactccctctcaaagttccaggaaatcagacattttgctgtaatctctgttagttgttggcaaactctggcccaccaactaaacctggtccaccacgtgtttttgtaaataaagttttattggtacacaaccacatccattcatttacatatcacccatggcagctttctcagtagaatggtggaattgagtagttgtaacagaaatcatctggccacggagtcaaacatgtttactatccagacctttatggtaaaaaaaatttggcagtttctggattgaaatatcagtcatgcatttggatcatgattctattcttccaggttttgtgcagcaacttaaactctggaagcctcagtacccagctcactgggataatgtgaggacgtattgtacttcctcagtcccaagaggtatattatttttgcattttggcatttctgaaattggaatgcatcttacaagcaatgcattttacaaacacttaacagtactcaggatctatattctacgaaaaaaataaaattagaattaacggccctttttttttttttgcctagctgtccataaaaataatggggcctctcaaaatttcctagaggtaataaaatgtgatcaatgagatactctgtgtaacgtgctgaatgtgtttgggacatacagtgagccctgggaagagcttagcaactgtttgggttcttttgggttatttgtcttggattctatgtcttgtgcatctctgcactcacccagcaccttgcatggtgtctggctcaatggaagcatctaatgaaagtaacttataaggtttttgttgttgctgtttttgagacagagtctcactctgtcacccaggctggagcgcaatggtgcaatctctgctcactgcaacctccacctcctggcttcaagtgattctcctgcctcagcttcccaccttggcctcctgagtagctgggattacaggcacccaccaccacgcctggctaatttttgtatttttgtagagatggggtttcaccatgttggccaggctggtctcaaactcctggcctcaagtgatctgcctgcctcggcctcccaaagtgcttggattacaggtgtgagccactgtacccagcaatttataaggttttaagactcaaataactccttctaaagtgaaatgagtctcctgttgtggtgggaggcagacatcattcaacttagaggacacagctggaaagcaatgtgagaaactaagaaaagtaacaagctggtagattggcatttctgacccatcttcctgcgaagtcaggtatcaaggctttaagtactaatagcacagtacctgatgagagaagcactggaatcaaaatttcagcagaggaaggaggtaccaagtgcaactctgaaggggcatgctgaagtgtgcaggggcatgcccaagagtcaagggccttacctcatcaccatatcgccgataactcacttcatacagcacgatcagaccattgggctccttcggctcctgccacatcaagtggacgacgttgttctcaaagatttcatgcgtcacagggccaacaatgtcatcagccttggctgtaaggagaggaagtgagaggcagggatgtaactcttggatgagatcccacttctgccacctgtccatggtgcaaccttgggctggtgacgtcattttcccacaacccattttcctcgtcagagaacggacatctaaaactcatcccacaagattgttaggaagattaaatgggttactttctgcgtataacttttttttttttttgagacagagtcttgctctgtcacccaggcgggagtgcagtggtgtattttctaaagtttacataatgattgcctatgactcataattttaaaatatgacctggcatggtggctcatgcctgtaatcccagcactttgggagctcaaggttggcggaccacttgagctcaggcattggagaccagcctgggcaacatggtggaaccatctctactgaaaatacaggtgtggtggcacacgcatgtagtcccagctactcaggaggctgaggcaggagaattgcttgaaccagggaggcggagattgcagtgagccaagattgcgccattgtactccagcctgggcgacagagcaagacttcatctcaaaaaaaaaaaaaaaaaaaaaaaaggccaggttcggtgctcatgcctgtaatcccagcactttgagaggccgatgtgggtggatcacttgagcccaggagttcaagaccagcctgggcaatatggtgaaaccccatctctactaaaaatacaaaaattagctgggcgtggtggcagacacctgtagtcccagctacttgggaggctgaagcagggaatcacttgacataggtggcagaggctggagtgagctgaggtcgcaccactgtactccagcctgggcgacagagcaaggctccgtctcaaacaaaaatgaaggccaataaggtaaaatacagatatgcactgcttagagggtggagaatctgtccttggtcagccttgatgtcccacccatgacactcggaccccggagcagcagccctaccttcaggcatggtcctcgcactgacgtaggctgccacactgcaccgttcctcaggggtgtcctggttgcaagcctgcagctcgatgcgatagcccgtgaagtgtcgcaagccggagatgaccagcgactccttgttcaccaccttctcaaaaggcctgtgctcctccggactcgtgggcacgctggtcgaggaagtgttggggaaagctgccaccgtgggcacggccaccgtcacattcccaacatcgccaagggacctgcgtttccgagatggcctggaacgacagtaggacatgtatgatgacaccatcaccatcattttttttaaaaaagtgacactggagaataaaaggcttgattaagaagaaagatcagagcgcaggagggtgcagcaatggggaacatggattacaatacagactgccaggaatgaccactcagagcagctttcaatatacccttgtgagcatctgaaggattagagcaggcccacctcgtgagggatgagtgcttctaagaccgtcaatggtagacacacaccgatattcccctcgacatgctcgatttcaggtttttcattttgcagataaataggccagccagggtcagtgacaaaaataagacaccaaaagcacgtaagagtctagcttttcaggaagccctgccaaatggcatttgctcattggcccaagctactgatcgacatcatcagtttaaataggaaaaaatacatcttttccttcttattgctgcttagggcacctgtataatttgagtgattaagctgcaattcttagaaaaggaatcacatcactcaggtcaggaagattaactccaagaaacatctatgcaattggcacacttctccccatcccttaagaagacatattaaacaacaaaggttgatagctaacaaattttaaaatacaaagaaaaaaggataaagaagaaaatgtaggctgggcgaggtggctcatgcctataatcccagtactttgggaggccaaggcgggcagataacctgaggttaggagttcaagaccagtctggccaacatggggaaaccccgtctctactaaaaatacaaaaattagccgagcctgatggtgcacagctttaatcccagctactcaggaggctgaggcaagagaattgcttgaacccgggaggcggaggttgcagtgagctgagatcgtgtcactgcactccagcctgggcgacagagtgagactctgtctcaaaaaaaaaaaaaagaaaagaaaatataaatcactcataaatccacagcccactgcttcctttggacaattttttccctgtaaatattatgtgtgaacatgatgaggatcaagcctgttttataagtaaactttgtctacttattatattggaagcatttactaaatattttcctttcaacataacattttaggagagaattttgggacttttcctttttaatattagggttttcctccatcatctacaaaagtagcatgtgttccctgcagaaaacttggaaaacgatgaatgactgtaaaatattccatttgctacgtgagtcgtcactcacttaaccatcctccttatttatttatttattttgagacagagtttcactcttgtcgcccaggctggagtgcgacggcgtgatcttggctcactgcaacctccgcctcctgagttcatgcgattctcctgcctcagcctcctgagtagctgggattacaggagtccgccaccatgcccagctaatttttgtatttttagtagagacggagtttcgccatgttggccaggctggtctcaaactcctgacctcaggtgatctgcccacctcagcctcccaaagtgccaggattacaggcatgagccaccgcacatggctctttttttttttttttgctgttataaatattcctttgatcattgtctgattgtcttattacttccccaaagtagattcctagaggaaaatattactaggttcagggagataagaaactctttaagcttcttaatacctacagctaaatggttgtccagaaactctatattgacttgtggttgcaccagcaggccatgagactgcattccaggacaatctcagcaacccctaagccttaatagtttttttttttctttctatgtttgtttgtctagatctttaacccaagagattaaaaatatgctatcactcgactacgttatttgcggatctttatattactgagtgtgacttcatttttcctttattggttctctgtgattctccaaagaattgtcccctccttgtcttttgtctgtttttccatgaatttcttgtgttttccttactcctgtgttgtttattcattaaggatattaaccttttatgtatcgtgctatacaacttactcttttccatttgccagtaagctttctttaaatgatttgaaacaggctttcatgtttatttgtacaatttaatatatcagtaacactttaaaacgtgttcctttataagtcattctagatggggttattatgagttgtgctaaggttttacggcaattttgaaagggatcttttcccttattttatattctaattattgcttgtgtatctacagtctttttgcttatttctatgtacctactttcccaaactctaactcatttaaaaagtttcataattggctttcctgggttttcaatgacacactagaagaggggtcaacaaaattttcccgtaaagggctagataataaatattttgggttttgcaagccaaatgacctctgtcacaactactctgtcattgtagcttaaagcagccctacatgatgtgtaaacaagtgggtggggttgcattccaataagagttcatttacaaaaacaggcagctagcccatgggccatagtttgcctacccttgagctagacgctctgcaaatagcaatgactttatttcccacattccattctttacaactctgatttctgtttcttgtcttattacattggctggatgcccagagaaatgttaattagtaatgatgagatggggcttccttgttttgttcctaactctgctaagaataattttaagaatgatgttagcttggctgttggtttaacctaggtaatatttatcttgtagaagaaatattctattatgagttttatgaagcctctttttttcctcccctttctctaagttaggaattttaaattaaggttattgaaacagatatgatcttccttattgcacctcttgatgaactagatgatgttatcaaatcttctgatcttaaaccatccttgcattttggagataaacaatattgccagtgcagtgttttatttgggacatttgaatctaacatcacatattagcttggcctgtggcttttgttcagtgcagtatctttgtcaagttcttttttttttttttttttttttgagacagagttttgctctgttgccaggctggagtgtgcaatggcgcaacctcggttcactgcaacctctgcctcccaggttcaagcgattctcctggctcagcctcccaagtagctgggattacaggcgtgtgccaccatgtctggctaatttttgtattgttagtagagacagtgtttcaccatgttgaccagaatgttctcaatctcttgaccttgtgatccgccccccacctcagcctcccaaagtactgggattacaggcatgagccaccatgctcaacctctttgtcaagttctttaagggtgttatgttcatttcataaaatgaactgggataacttttatagatttctgtgccctaaaatagtttttctattataggaaatagttgctctctcacaatttgaaagaacgtgtctataaaactctctgggccaagggacttttttgaggaaattatttgacacatatctttttccaaggttcataaccacttaatttttctgcttctttttgaatccatttagacaagttaaattttcccaccttactgaaactttcaaatttagcaagtgcaccattgtccaaagaacttaacacattaaaattttcttcagacgctagttttatgtcatcttctttccttctggtttgtgttttccctttgattatgtttaccataggcttagctgttattgcttttcccttcctaacacatttatagttttatagtttaaagtttatttcttaatttatcaatccatttaagtctgctaagtaacatcaaagccaagctttgacaatattctacaagttaaggtatgtgatattcacattttcattattttccaaaaggacttcaatggaagtttccatttctgctttggcccgatagatatgtaagtgtttaactttttaactttttttttttttagacagagtctcgctctgttgcccaggctggagggcagtggcgtgatctcggctcactgcaacctccacctcccaggttcaagtgattcttctgcctcagtctcctgagtagctgggactacaggcgcacgttaccacatctggctaatttttgtatttttagtagagaaggggtttcaccatattggccaggctggtctcaaactcctgacctcaggtgatccgcctgcctgggcctcccaaagtgctgcgattacaggtgtgagtcactgcgcccagcctgtaagtgtttaacttttaaccaccaagaagtgaagttttctgtttaatcttttgaaattaacttttagtttctattgcagcgtcatcagaaaatgtgtggtcagaaaacaaatcctactttgggggcatttcttaagattctctttatggtctttttgtattaaaagactaacaacattgtagaatggaaaagaaaacagctccaccacttatcaagccaaagatatgtccgtattagcaagattcagataatttctatacaggcacaaatgggtctcgtgaaaataaccaagacgttggtgcttcatgagtaactactgagaaattggtatctcaacaaccagagatgtaaaatgggctcatcaaacaggccaaatgagtttatataccaaaaagattataaccaaaaagaccatgaagtggcaaaagacaaagcatcaactgatttttttttttgagacagagtcttgctctgttgcccaggctggagtgcagtggtgtgatcttggctcactgtaacttccaatttctgggttcaagcgattctcctgcctcagcctcccaagtagctgggattacaggcgtgcatcatcatgcccggctaatttttgtatttttagtagagacggggtttcgccatgttgcccaggctggtttcaaactcttgacctcaggtgatctgcctgcctgggcctcccaaagtgctgggattacaggcatcaggcatgagccacagcacctggcctaggcagcattttattatccagcaatcccacactaacctggtcatctcaaccaagggtccttctgaccccatcacccagggggatatttagcaatgtctgaagatatttttggttattactactttagggggaagacacactactggcatcagatgagtggaagccagggatgcttctcagtgttgttggacagtgccctagaataatctgaccccaaatattatttattattattattagtattatgtatttattcttttttttttttttttttgagacagagtctcgctctgtcacccaggctggaatgcagtggcgagatctcggctcaccgcaacctccgcctccagaaatcaagtgattctcctgcctcggcctcccaagtagctgggactacaggcgtgtgtcaccatgcccggctaatttttatatttcttgtagtaacggggtttcaccatcttggtcaggctggtctcgaactcctggcctcaagtgattgccccgcctgggcctctcaaagtgttgggattacaggcgtgagctaccaagtccagctgtggccccaaatattattttatttttattttttttgagacggagtctcgctctgtggcccaggctggagtgcagtggcacgatcttggctcactgcaagctccgcgtcccaggttcacgccattctcctgcctcagcctcccgagtagctgggactacaggcgtgtgtcaccacgcccggctaatttttatgtttcttgtagtaacggggtttcaccatcttggtcaggctggtctcgaactcctggcctcaagtgattgccccgcctggggtagctgcgtcaccacgcccagctaatttcttgtatttttagtagtgacggggtttcaccgtgttagccaggatggtctcgatcttctgatctcatgatccgcccgcctcggcctcccaaagtgctgggattacaggcgtgagccacccgaatattattaatagcaggactgagattgagatctgctttggaccaagcccgtacatttttagacccttcttggctacagttagtattgcaaatggccactagagggcagatcaggccacacaggtgcctgggaaaaaataaataaataaacactctgctaaaggaagaaaatctctccaagtggtcccaacttgcctctttagtctcacctcctgttcctcccaaaagccacgacaggtaaacatctccttgcctttctcccaagttctccaagctttttctctctcccaggaccatactgcttcattctcttaagactcaagttgaaaagaaacgtccctggccaggggcggtggctcacgcctgtaattccagcactttgggaggccgaggcgggcggatcgcctgaggtcgggagatcgagaccagcctgaccaacatggagaaaccctgtctctactaaaagtacaaaaattagccgggcgtggtggcgcatgcctgtaatcccagctactcaggaggctgaggcaggagaattgcttgaacccgggaggtggaggttgtggagagccgagatcgcaccactgcactctagcctgggcaacaagagtgaaattccatccaaaaaaaaaagaagaaggaaagaaggaagggagggagggacggacggagggagagagggagggaataaagaaaagaaaagaaagaaggaaagaaagaaagaaggaaaaaaagaaagaaggaaggaaggaaggaaggaaggaaggaaggaaggaaggaaggaaggaagagatccctgactctcctccgtggaattcagtgagcgacacggtgttcttttgttcataccctgtcgccctttcatgaaaatattctgtttccagatcaacctccattcatggtgtaggagctgctgggtcggggcacccagccgcggggagctcagactccggggacccccacccacctctgcaaatgcacgcgggaggtgcagagatgtttagtgagcaaacagtggctgcaaacagaaggcagggagggggtacccaggaagcactcccatgattctatgttttagcaagagtgtgttagtgaaggtttctccccacattcatgcccagatttcatttcagagtgaaggcattggatttctgaattggtgaagcatctgctctccagcacagctgcccgccgcatgcaaaaagccacagaaacccctgggttctccgaggcatctgcctggcacgccgccggccctgcgcggagcaggcaccaggggtcgcacaggtgagtcatacctagggtcctcggcaccagtgcctgaagaggtttttctgtggaaacaaaaccaacgcctttgaggacagagggaacttcattagacagaccactgggctctgacacttggaggccacatgtgtccgagtaagggcaccctggctttgaccctggaccactcgctcccatcacttgctagacggagtgagctacatcttccccagcaggtgcaggggtccagcaagggaaggggaagaaatcagagaaaattctccccagagacggcctgctgaggtggccctgggatgtcaaacgtgactacatgtggacatcacaactgactcagccacttctccaagtctggcagaatttttcttttctttcccttctttcttctttctctctctctttctggtttctttcctctttctccttttcttttctctttctcttttctctctccctctctctccttccttccttctttcctcttttactttctttctctctttttccctctttccttccttcatttgctttctttctctttccttccttctttttttcattttctttctctttcttttctttcttttccttttttccttccttccttccctcctctctccctcccttgcccccttcctttctctgtcctttctttctctctttcctttctttctttctctttctttctttctttctttctttctttctttctttctttctttctttttctttctctcttccttccttcctctttccctccctccctccattcctttctttctttctttttttcccttccttcctttttgagacagggtcttgctctgttgcccaggctggagtgcaatggtgccatcatagctcacagcagcctccaactcctgtgctccagcaattctcccgcctcagcctccggagtagctgggactacaaggcatgcaccaacatgtctggctattttttttttttttttccttttttagtagagatagggtctcactctgttgctcaggctggtctccacctttggcctcaactgattctcccacttcggcctcccaaagtgctgggattacacgagtgagccactgtgcctagccaacattttgtttgtaacaggtgaaacagtaaccactttgaagccttggctgtccccctgaacattcttttggactcagggtcataggggaaacatgcaacaaaaaaagaaaaagaaaagaaaaaaaaaaaagaggattcttacacactggtggttctgggagaaaagtctgctcggatgaatagcattggtaaacatctgaacagatacttttaatttttttttagagacagggtctcactctgtcacccaggctggagcgcagtggcgccatcatcgcttatcgtagcctccatctcctggcctcttgtgatccttctttctcagcctccccatgggctaggagttcagacatgcattaccatgcctgactaatttttaaactgtttttttttttttttggtagcgatggggtctcattatgttgcccaggctggcctcaagcaaccctaccacctcggcttcccaactagctgggaccacaggcttacaccactgcgctcagctaaagcctcaataatcacggccaggcacggtggctcacacctataatcccagcactctgggaggccgaggcaggcagatcacctgaggtcaggggttagagaccagcctagccaacatggcaaaaccccgtctctactaaaaatataaaaattagctgggcgtggtgctgcgcacctgtagtcccagctacttgggaggctgaggcacaagaatcactcgaacccggaaagggtgagctgaaatcgcaccaccgcactccagcctggacgatagagtgagactctgtcaaaaaaaaaaaaaaaagagagagagagaaaaaaaaaaatgttaatcgtctaacggagtttgttttggaactcacgtggagaccagctcaggagaggtaagaaaggcaaatgctgagttttgtccatttttccccttttgtgcgattatttgctcttcctgataaaattcccctcgaaatttcgaaactgcaagatctcttcctccacccaggaaagggctccattcagactccacccacccttctgccgtctctgggtcccactacctctcggtccctaagtaatgaccttccaccaacaccaagccaattggcacccactaagagagcccagcgccaagtcctgacctggggacgaaaaccacgttgtgcaggtaatcctcaaacgtcttcctaaacgaggactcctccagctccttcaggatctgagagtctgtctttggacaggagcagcattcgccggccgaatcctcatactcactctggttgtgcttctgagaatcttcagactcgaatggtggagaccaggtcctcgagggcagcttcagccctggagaaagaaacagaaaaggggggctcaagtctctgcggctgaacacacatacacacacacacacaccccacacacacacacaccacacacacacaccacacacacacacaccacacacccccccacacacacacaccacacacatcacacaacacaccacacatacacacaccacaaacacacaaccacacacacacaccacacaccacacacaccacacaacacaccacacatacacacaccacaaacacacaaccacacacacaccacacacaccacacaccacacacacgcaccacacacacaccatacacgcaccacacacacactacatgcacacctcacacaccacaccacacaccgcacacacaccacacaaatcacacacacaccacacacacccacgccacacaccacagaccacacaccacacaccccacacacaccatacacgcaccacacacacaccacatacacacttcacacacaccacacaccacacaaatcacacacaccaccacacccacgccacacaccacacacacaccacacacgcaccacacacacacacagtgaagggggccttctcagagaggctgagctgagacagagcctagatttgagctccgctttggaaaaaagccagacactatggttcacgcctgtggtcccagctacttgggaggctcaggtgagaggatcgcttgagcccaggagttcgaggctgcagtgagctatgattgcacccctacacttcagcctgggtgacagagtagaaccctgtctcaaaagattaaaaatatagccgagcacagtggctcacacccttaatcctggcactttcggaggccgaggtgtgaggatcacgtgagcccaggagttcaagaccagcctgggcaatgtggtgaaaccctgtctctactaaaaataaagtaaaataaccaataaaaataggccaggcagctcacacctgtaatcccagcactttgggaggctgaggtaggcagaccacctgaggtcaggagttcgagaccagcctggccaacatggtgaaaccccgtctttactaaaaatacaaaaattagccaggtgtagtggcgcatgcctgtaatcccagctactcaggaggtcgaggcaggagaatcgcttgaacctgggaggtggaggttgcagtgagctgagatggcaccactgcactccagcctgggtgacagagcgagactccgtctcaaaaaaataataaataaataaataaaatatctgtatctagagtgtcatctgagaagtgcatgtcaacatgttttattagtttagtgcataagtaattgcagcttttgctattaaaagtaatggcaaaaaaccacaattacttttttttttttttttttttgagatggagtctcgttctgttacccaggctggagtgcagtggcgcgatcttggctcactgcaagctccaccgcttgggttcatggcattctcctgcctcagcctcctgagtagctgggactacaggcggccgctgccacgcccggctaatttgttgtatttttagtagagatggggtttcattgtgttagccaggatggtctcgatctcctgacctcgtgatctgcccgccttggcctcccaaagtgctgggattacaggcgtgagccactgcacccggcccacaattacttttgcaccaacctaatagaaactgccaggtggctgggcgcggtggctcactcctgtaatcccagcactttgggaggccgaggcgggcagatcacctgaggtcaggaggtccggaccatcctagccaacatggcgaaaccccgtctctactcaaaatacaaaagttagccgggcgtggtggtgggtgcctgtaatcccagctactcaggaggctgaggcaggaggattgtttgaacccgggaagcagaggttgcagtgagccgagattgagccattgcactccagcctaggcgacaacagcgagactctgtctcaaaaaaaggcaacaactgcccgacaccataatcacaggactgaagattataaggtaaccagacaatgcttctgtcttcagtggacttacagtctacaataaactcataaatacacagtcacaggtcagatgttggggtaaaagaacagtgggtgtctgcgggtgccattttcatgaaggggtctcaaagaaagtcaccactgagacatcctgaattcagcaaaggaaagcaccatccacatatcgtggtgtaaagcaattcagacatagcagaaacccagcagaaaggccccaggacaggaattttcttggcacattaaaaaacgtctggccaggcgtggtggccctctcctgtaatcccagcactttgggaagccgaggcaggaggatcacttgaggtcaggagttcgagaccagcctggccaacatatagtgaaacgctgtctctactaaaaaatccaaaaatcagctgcacgtggtggcacatgcctgtagtcccagctacttgggaggctgaggcaggagaatcacttgaacctggaaggcggaggttgcattgagccaagattgcgccactgcactccagcctgggtgacagaggaagcattccatctctcaaaaaaaaaaaaaaaaatctctggaaaccaatatagctggaagggggtgagagagagaatggtgggagggggttagaaaaagataaagggggccaggtacagtggctcttgcctgtaataccagaactttgggaggctgagggggaaggatcacttgagcccaggagttcaagataagcctggccaacaagatgaaactccgtctctaccaaaaaatacaaaaattagccaggcatggtggtgtgcgcctgtaatcccagctactcaggaggctgaggtaggaggattgcttgagcctgggaagtcgaggctgcagtgagctgagatggggccactgcactccagcctgggcaacagagtgaaatcatgttgaagaagaagaaaaagaaagaagaaggagaagaaggaggaggagaaggagccaggtcacagctgcatgaaaatatcaatcaatcaattaatcaaccacacaaataagatgggagggcagagtagaatgccatatggaattcttttttttttttttttttttttttttttgagacagtcttgctctgtcgcccaggctggagtgcagtggcgtgatcttggctcactgcagcctccgcctcctggattcaagtgagtctcctgcctcagcctctcaagtagctgggattacaggcgcctgccaccaccctggctaatgttttgtatttttagcagagacagagtttcatcatgttggccaggctggtctggaactcctgacctcatgtgatctgcccacctcggcctcccaaagtgctggaattacaggcctgggtcaccacactgggcctccacatggaattctaaggggtccattcatgagtccagaaatcagacttgatcagtgaatggttctcacccagggggtgattttgtctcctactagggacattgggcaacatctggagatatttttaggtgtcaggacctggctggggcgtcctcctggagcatggaatgggtgaagaccagagatgctgctgagcaccctgaagtgctcgggacagtcccaccccagagaatgatccaacgccagacagaaaaaacaccaagacagagaaaccctgacctaaaggcatgagaggagatagaggaaggaacttttcaaacatgcatagaaaagggaatttaaaaattaataaatgaagaagaacaccagtagcttataaaggtagcagtcctaaaaatacaaaatacaatactatttctctcttttttttttttttttttttttttgagatggggtcttgctctgtcgcccaggctgcagtgcagtggcgcaatcttggctcactgcaacctctgcctcctgggttcaagcgattctcctgtctcagctccactccccgtaactgggattacaggcatgcaccatcacacctggctaattttttgtttgtttgtttgttttttgtttttgtttttttgggatggagtctcgctcttgttgcccaggccggactgcagtggcgctatctcggctcactgcaagctctgcctcccgggttcacgccattctcctgcctcagcctcccaagtagctgggactacaggcgtgcaccaccatgcccggctaattttgtatttttagtagagacggggtttggccatgttggccaggctggtctgaactcctgacctcaggtggtccacccgcctcagcctcccaaagtgctgggattataggcttgagccactgcgcctggcattttttttgtatttttattagagacggggttttgccatgttggccaggctggtcttgatctcccgacctcaggtgatccacccgccttggcctcccaaagtgctgggattacaggcgtgagccactgcgcccagccgatttttgtattttttttttttttttttggtagagacagagttttgctgtgttggccaggctgatctcaaactcctgagctcgaacgatctgcccgccttggcctcccaaagtgctgggattacaggcatgagccatcgcacccagcctacaatacttaagtaccgcagctggtcatgtcttaagccccgaagtcaaatcccagggttcttgtgacccacggtgcaagcacagttatgcctctggtacagccactgagatggacggacacagctctttacaagcaaaatctgcaacagtccctggagagccacctcccctgctgccactctgcttggtgcctggtgactgctgagcaaaggaaattccattttctctcctccccttaatgcctcgaggatagacaataagctctaaatcgtgtatcaagtaccttcctgtgaatggtgagtatccactcggaaacccaagtatttacacagctttaaaagcctatgagagactggaaaatacttcttaagtttataaatagacatagaataccctgcctgggttaactctgatgggagctagttacagcattacagatggaaaaaaaaatgtagaactgcctgaataagggaagctcctggtattattattattattattattattattattattattattattatttggagaggaagggatatttgttcaggcacaggtatcattcctgatacctgctacctcttcctagaatccactgcatgaaacatggtacactgtggttttcctgagattagaaaaatgaagcataatgggccaggcgcggtgactcacgcctgtaatcccagcacgttgggaggccaaggtgggcagatcacgaggtcaggagatcgagaccatcctggctaacatggtgaaaccccgtctctactaaaaaatacaaaaaattagccgggcgtggtggcgggcgcctgtagtcccagctactcgggaggctgacgcaggagaatggcgtgaacccgggaggcggagcttgcagtgagccgagatcacgccactgaactccagcctgggtgacagagcgagactccgtctcaaaaaaataaaaagaaaagaaaagaaaaatgagcataatgaagtctctagaatcagattcacagagacagaaaggaggatggtgggtgctggggctgggggaaggagaaggggagtgagtgtttcatggggacagagtttcagtttgagaagatgagaaagttctggagatgatggtggtaatggccgcacaaccacggcaatgcacttaatgcagctcaactgtgctcttaaacatggttataataataaattgtatgtgatgtatattttaccgtggtaacaacatatacactagtgatattaacaggaagggtttgtaagcttatttatttgtgtgtgtgtgtgtttgaaattgtggaaaaataagcatcacataaaatataccaatttaccatctcaatttttgttttgttttgtttttggtggagtcttgctctgttgccaggctggagtgcaatggcgtgatctcggctcactgcaacctctgcctcccagattcaagcgattctcctgcctcagcctcctgagtagctgggattacaggcacccaccaccacacccaactaatttttgtatttttagtagagacggggtttcaccatgttgcccaggctggtctcgaactcctggcctcaaagtgatccaccccacctcggcctcccagtgtgctgggattacaggcgtgagccactgtgcccggtaaatctcaaccattttaagtgtgcagttctgtggtattaagtgcattcacaatgttgtgcaatcatcaccaccatcatctccggaactttctcatcttcccaaactgaaactctgtcctcaacccgtcccctccgcagtccctggcactccccattctactttctgtctctatgaatctgaggactctagggacctcctaggagtgaaatcacacagaatttgtccttagtgagtttccttttaatgatattaactttgtgacaattacaaataaaaccatgtttaaatggtcccttggtaattacagatttagactttcggaattaaaaaaaaaaaaaaggaagcttcgagtgacattactggtggcagctctcacgggtggttctggttacttgaatgcagggccaacagcttacagcggagctgatgactggactcgccctggagttatataaagcatcagagcagataaatcacgtttgcaaccctcggctcaggcggggatgatgtcacacacatacatatagcatatgagcttagagctgggacagctcccagagatcatctgtcctcccgccccttctcccaaaaaggaggcagacggtgacttgcttgggaacttagccaaagcccttcagcaggtcagggccagagccaagagcaaatgttgagctcctggcctcagccacacctcgccagtggccccctggccttctcctccagggtcatggaccgaggatatcactaacagaaaatatctcaagaaaaatacatcaagatgcacaaggaaaccaaaactaaagaaggaaatgggcccagcgcagtggctcaggtctgtaataccagcactttgggaggctgaggcaggaggatcgcttgtggtcaggagttcgagaccaccctgggcaacatatcaagatccccacctctaaaaaattattattatttttattattattatttttcttagatggagttttgcttttgttacccaggctggagtgcaatggtgcaagctcggctcattgcaacctccacctcccgggttcaagcgattcttctgcctcagcctcctgagtagctgggattacaggcccacgcctggctaatttttgtattttgagtagagacggggttttgccatattggccagggtggtctcaaactcctgacccctggtgatccacccgcctcggcctcccaaagtgctgggattacaggcatgagccactgtgcccggcctaaaaaattattttaaataattagccaggtatagtgtctcaggcctgtagtcctgtgtagtccagctactcaggaggctgaggcgggaagatcgtttgagcccaggagttcaagcctgcagtgagctatgattgtgccactgcactccagcctggacaacagagtgagaccccatcttaaaaaagaagaagaaaaagaaaaagaaaaaagtgacagatgcttctccagtttggtgggttctaaaaaaacccaatgttaaaataattttaggctgggcgcggtggctcacgcctgtaatcccagcactttgggaggctgagacgggtggatcatttgaggtcaggaattcaagaccaccctggccaacatggtgaaaccccgtctctactaaaaatacaaaaattagccggtgtagtggcagcacctgtaatcccagctattcaggaggctaaggcacaagaatcgcttgaacccagcaggcggaggttgcagtgagccaagatcaagccactgcactccagcctgggtgacggagtgagactccgtgtcaaaaaaaaaaaaaaagaaaataataataataataattttaaactaatgtatacacactagtttgagactttaaatattattccattttccttcagatggatggaggtctattaagtaaacaagattaagaaaaatttgtcattaagttttataataaaattatttatataattatttataaattttatttataatttttatacaataaaatgattgcacaacattgtgaatgcacttaatgccttttttttttaattttgtataattttttttatatatatagagacagggtctcgctctgtcacccaggctggagtgcactggaataatcatagctcactgcagacttgaactcctgggctcaagagatcctcccgcctgggcctcccaagtaactgggactacaggtgtacaccaccatttttttaaatttttttagagatgggatcttgctatgttgcccaggctggtctcaaactcccggcctccagtgatcctcccaccttggcctcccaatgtgctgggattacaggcatgagcgccaagcctggcagacatttttaattgaaagtatggggtgggggatatgagataaccaattcttgctgccttcgatccttacaactaaaggatctcagtggggccaaaatccttccctgactttgtcaataaccattagttgtgtttctagctttgcacagaagtcttgcgtgggttaacacagctgcatccccatcagtgtgaggagggatgaagagaacaaggaaggcagggagggagaaagaaggagagacaagaggagaaaatcccagagggaaatggtgccaagacatgggaaaaatctggttttgacacaagtcttcagtgcgtgcttgtgttacgatgtttaaaaatgtgtatgtatgagccggtcatagtggctcacgcctgtaatcccagcgctttgggaggctgaggggggtgaattgcttgaagccaggagtttgagaccagcctgggcaatataaggagactccatctctacaaaaagaagtttaaaaattagccagggccaggcgtggtggctcatgcctgtaatcacagcactttgggaggccgaggcgggtggatcatttgaggtcaggagttcaagaccagcctggccaacatggtgaaaccccatctctactaaaaatacaaaaattagccgggtgtggtggcaggcgcctgtagtcccagctactcaggagcctgaggcaggagaatcgcttgcgcctgggaggcagaagttgcaatgagccgagatcatgccactgcactccagcctgggtgacagagtgagaccctgtctcaaaaaaaaaaaaaaaaaaaaaaattacctgggcatgctggtgcacacctgcagacaattgtggtgttccagcaactcatgaggctgaggcaagaggattgcttgagcctgggaggtggaggttgcagtgagcagagatcatgccactgcactccagcctgggcaacagagtaagaccctgtctcaaaaaaaaaaaaaaaataggccgggtgtggtggctcatgcctgtaatcccagcactttgggaggccaaggtgggtggatcacctgaggtcacctgaggtcgggagtttgagaccaggctgaccaacatggagaaaccccgtccctactaaaaataccaaattagccgggcgtggtggcgcgtgcctgtaatcccagctactcgggaggctgatgcaggagaatcacttgaacccgagaggtggaggttgcgatgagccaaggtcgcgtcattgcactccagcctgggcaacaagagtgaaactccatctcaaaaaagtaaataaataaaaaataaaataaataaataaatagataaaaacatgtatgtgtgttttcatatgagatagaatggagtgtgtgtgtgtgtgccttccgacactgagacacaggaagagatagctgcttccctagaggtgaagcaaagtgcatcagacacacgtgtgcaaaccccaccgatcctagcacagctgcctgcactcacctttgaggcaataatccagctcgaacagctcactgtcttccgcctgcctctcccagaaaaccaggtagtgggtgatgttgccattggggtcggagggtggtttccacttcagaataatctgggatgatgagttagacactgagattggatccaggggcacagaggggtctgtcagggagaaaggaaatgggtccatcatgagaaacagtgtgcaaagaaagctggtgggaggatggcgggggacacacaagttaaagacatcatgagggcacccatcccagcattttgggcggccaaggcaggcggatcacgaggtcaggagatcgagaccatcctggttaacacagtgaaaccccgtctctactaaaaatacaaaaaattagccaggtgtggtggtgggcgcctgtagtcccagctacttgggaggctgaggcaggagaatggcgtgaacctgggaggcggagcttgcagtgagccgagattgcgccactgcactccagcctgggtgacagagcaagagtccgtctcaaaacaaaacaaaacaaaaaagaaaaaaaaaaccaccaccaaccaaccaaacaaaacccaaaaaacccaaagtaacggaggtggccgagggagctggggatggggagggagtccaaacacctgggagctagaagtttctgaaaactgtaagtcttttggtgtcactaaaagatacaggatgaatgagcggggattaactgaagaagatagggttgatttataaagtttgaattcgaggccaggcacagtggctcatgcctgtaatcccagcactttagaaggccgaggtgggcgaatcatctgaatcacctgagatcaggagttcgagactacacctggccaacatggtgaaaccctatctctactaaaaaaaaaaaaaaaaaaaaaaaattagctggacatggtggtgggcgcctgtaatctcagcttcctgggaggctgaggcaggagaatcttgaacctgggcagaggttgcagtgagctgagaatgcgccattgaactccagcctgagagacaagagtgaaactccgttaaaaaaaaaaaaaaaaaaaaaaaagcttgaatttgagcctacaggacggggtttctcacccttagtactattggcttttaggactggataattctttgtcatgaaggagggtgcatcctgtgtgttgcaggacatggaacagcctctctggcttccgcccacgaaatgccagtggtttcatctccacagctgtaacaaccaaaaatgtctccagacattgattggcagctgttccctggcagagcagttaacctcctttgggaactactgctataagagaagcacttaggttttacaaaaatataattaggccgggcccagtggctcatgcctgtaatcccagcactttgggaggccaaggtgggcggatcatttgaggtcaggagttccagagcagcctggccaacatggtgaagccccatctctattaaaaatacaaaaatggctgggcgcggtggctcatgcctgtaatcccagcactttgggaagccgaggcaggcggatcacctgaggctcggagttcgagaccagcctgaccaacatggagaaaccttgtctctacaaaaaaaaaaaaaaaaaaaaaattcgccaatcgtggtggtgcatgcatgtaatcccagttactcgggaggctgaggcaggagaatcgcttgaacccgggaggcagaggttgcagtgagctgagatagggccattgcactccagcctaggcaacaagagcgaaactccatctcaaaaaaaaaaaaaaaaaaaaaaaaggctggcatggtggcttatgcctgtaatcccagcactttgggaggccaaggtgggcagattgcaggtcaagagattgagaccatcctggccaacatggtgaaatcccatctctactaaaaatacaaaaattagctgggcgtggtggcacgcctgtagttgcagctacttgggagactgaggcaggagaatcacttgaactgggacggggaggttacagtgagctgagatcacaccactgcactccagcctcagtgacagagtgagactctgtctcaaaaaacaaaacaaaacaaaacaaaaattagccaagtgtgctgtaatcccagcaacttgggaggctgaggcaggagaatcacttgaacctgggaggtggaggttgcagtgagtccagatggcgccactgcactccagcctgggtgacagagtgagactccatctcaaacaaacaaacataattaaattgctgtgaaatactccaggccaaaacaaacaacaaaacaaaaagaagtaacaagtgggaagagggaacaggcgtcgagatgaaacaaaaatgaccaaaggctgaagctgggaggcggctaactatggggttttgttctgtgttgtgaatatttgacaatttttcataataggatgaaaaatataaatattcccatcaagtggcttgttgctactgcctcgtctgaaactataagcctcaatacccagctcctttaaaagccaataactgactgggcaaggtggctcacacttctaatcccaggactttgggaggccgaggcaggaggatcacttgaggccaggggttcaagaccagcctgggtaacacagcaacgttctgtctctacaagaaatacaaaaattagctgggtatagtggtgcatgcctgtagtcccagctactcaggaggctgaggtgggagaattacttgaacctgggaggcggaggttgcagtgagccgagatcatgccattgcactccagtccgggtgacagagtgagacttcatctcaaagaaaaaaaaaaaaaaaagccacacatggtggtatactctggtagttccttctacttaggaggctgaggcagaaggattgcttgagcccaggagtttgaggctgcagtgagccatgatcaccccactgcattgcactctagcctgggtgacaaagtaagaccctgtctaaaaaaaaaaaaaaagccaataaccatatcaaggagcattttatacaacctcactgcatcagcctattaaaagcaagaggtctgattcacatacgaattcacattcccaagacacactcactggtggcatctgtctggacataaatgatgtcactcttggccccataggtccggcgttcatccgaaaaggtgaccagggtcttcacaaagatggcatactgggtccagggcttgagaccccgcatcagccaccctgggtggttctgtgatttggggtcgttggacctcaggggtgggtcaatgtctaccaccgtccaactgttggaaccacacgcatcctgcccgtcgaactccgtcacattctgataagggctttcaagacaaaacagcagaaggcagttacccttacaagaccgtcacactgagtgccgtgcagatgaggcctgggaagttacatcccatagggtcacatgttactcacccaacaatctaatgccacaagaaaaaataactcgggaacagccaaagagaaaggaactgtcaaccctgacatctcaatgaaaaaacacagcttgggcatcccttattcaaaacacttgagacttggccaagtgcagtggctcacgcctgtaatcccagcactttgggaggccgagaatggcggatcaccagaagtcaggagttcgagaccagcctggccaacatggtgaaaccccgtctctactaaaaatacaaaaattatctgggcatggtggcagatgcttgtaatcccagctattcaggaggttgaggcaggagaattgcttgaacccgggaggcagaggtagcatcagctgagatcgcaccactgcactccagcctgggcgacaaagggagactctgtttcaaaaacataaataaataaataaataaataaatgcttgggaccagaagtgttttggattttggatattttggggttttgaaatatttgcattttactagttaatttgcattgtactggttcagcatctctaatctaaaaatctgaaatctgaaatgctccaataagcatctcctttgagtatcaagtcggcccacaaaaagctttggattttggagcattataaatttcagattttcagattagggatactcaatctgtaataatagtaatagcaggagctccctcacaagttactgataagattagactgtgtgtcagtgctcagcaaggcacaaggtaaatcttgagggctagaactattattaatattactactggtcaggtgcggtggctcatgcctgtaatcccagcactttgggaggccaaggtgggcagatcacctgaggtcaggagtttgagaccagcctggccaacatggcaaaacccgtctctatcaaaaatacacaaattagctacgtgtgatggtgtatgcccataatctcagctactcaagagactgaggcaggagaactgcttgaacccgggaggcagaggttgcagtgagccaagatctgccactgcactgtaccctgggcaacagagcaagactctgtctcaaaaaaaaaaaaaaaattggggataaaaaagaaaaatagataagcaatacatttgataacatccacttagtagactgagctcctgactactaaggatgtctgatgagacatacacaggcaaggcaaaatagaatattgccccaggaaactggccagtccgggcttctatgggaaagctgtctgcttccattttaggcatttgataaaagcagacactattgactttgcatgccatcgactggtgagattgtaaaaaggaacctaagatatttattccaggaggaggagggagatagacaggaacccaagaggggcagattggagcacaaacgtagcaagcacagagccagccagccctcgcctcctcagcgtctctctaactcttctacttacgcctctttgtagaacagcatgaaccccaagaggtctcggaagtcggggggccagtacggctcccatctcagcaagatcttgtcaaaagatgtccgaatgtaagaaaatttaagtaactcattttcacctggaaaagttaaaacaaaaggcaaaaatgagctatttcagtgtagtttcagaccaaagcctgggacccccacacttcctggagggaccgtgagaaggcagaggtgacgctgctattcccttaagggtctcctccccatgtgcctggctgagtatgaatgggggaagattcaaaggtaagagccagttttgcaacttggccactcacactcacgtaagccaatgacttgactcagccagacagtcaactgaataagcgcagtctgtacccgcgcaagaaggacaaccggccaatagttattggaggaagggatttccaagggtgatgtttgtcctgacacaacgttgtctcgcatatggacttgtaagactgacctggaaggaggtgcaactccagtgcaaataaacctatgccaagtgagtttagagaccctgcagatcattagacatcggagagacgcatctaagtaattctctctgcctagaagacaaaccctctcctaaacctcaccccaacctcgctctctctccttgcactacattttttttgagacagtcttgctctgtcaccaaggctggagtgcagtccacctaccgggtttaagcaattctcatgcctcagcctctcaagtagctgggattacaggcacccaccaccacgtccagctagtttttgtattttttttttttagtagagatggagtttcaccacattggccaggctggtctcgaactcctgacctcaagtgatctgcctgcctcggcctcccagagtgctgggattccaggcgtgagccaccatgcccagcccttgcactacattttgacataagtaactaactccccatgaaggtatcccagaagcccttggcagctcactgtttagaatctgtcagggaagtgcagtcagcaggcagcctgcagctgcagaaactgcaggacctgctgtagcattccagccaaaacctgactctccctggacagcccccacctatgactgagcttggtagatgcctggccgtccctttgcaatgcagaacttccctgcagacaaccgtggccttgatctctttctgggtttggccaagactcagggatgcatcaccatctgagactctcccagccctatcctccctccttcccgctctctgttcacagaggtcagacacacgctattgtcaaaaggctcttcatggctgagcgtggtgactcacacctgtaatctcagcactttgggaggccgaggcgggaggatcacctgaggtcaggagttcaagaccaccctggccaacatggcaaaaccctgtctctactaaaaatacaaaaaaaaaaattagccgggcttggtggcatgtgcctgtaatcccagctattctggaggctgaggcgagataattacctgaacccaggggaaggaggttgcagtgaggcaagatcacgccactgcactccagccctgggtgacagagcaagactctgtcccaaaaaaaaaaaaaaaaaaaaaagaagctcttcctctgtttcatattttatgaatattaccctcaatacattttctgcactcctaacttcaacttggcagtcacttcccaggagatgcagactgacataggtattttactcaactttgaagtcttcagcatcagcctgatacacatataagaaggtgtcatccattcatccatcattcattcatccattcattcagtgcttgtatgacttcatcccgtatccggtactatatggcacagtaagcatagtgataatattaataaatgtgcagaatctgccctcagtaagaaagcctatcacacagtgagttgttagagggaagtaataccccctgggggtgactgtgatggatgagagaggacagccacattatctggtttgtggaccacttacagcaggggtccccagcccctgggccacagaccagtacttatccatggcctgttacgaacagggctgtacagcaggaggtgagtgataggtgagcaagtgaagcttcatctgtatttacagtcactccccatcgcttgcatgaccacctgagttctgcctcctgtcagattagcggcggcattagattctcacaggggtgtgaaccctattgtgaactgtgtacatgaggtacctagactgcacactccttatgaaaatctaatgcctgatgatctgtcactgtctcccatcacccccagctgggaccatctagttgcaggaacacaagctcagggttcccattgattctacatgatggtgagttgtacaattctttcattatatattacaatgtaatcataataggaataaagtgcatagtaaatgtaatgcacttgaatcatgctgaaaccatccccacccaccaccagtccatggaaaaaccatcttccactacaccggtccctcatgccaaaaaggttggggaccagtgacttacaggatgcctggtccccattggtcttcagggcaatgtcgtttctctcctggcgccccttggttcctgaaacttcttccatcttgtggatttctgacaagcagagtttggggttatagtggaagaagagtttcccctgagtgatggtgaggttgtgtttgctccagtcccagagctgccttaggttctggttgtccaaggcatagaaggagtagttcctatggaaaaaacacacacatctagtcattcaacggctggtcttctacaactccaagatggtgtggccatgctcggagttgatcttgttcagtgctacgtgcctaatcctctccacttgcttggcacatactcaacacatatttgttgaatgtggataacagaggaagttgaggaagttttcatggccaggaaggaggctcagctcagtcttgaagaggggtggtgagtctgtgatggactgaggaataggttttgcagaaaccaatttctgcaaataggggaaatactgataacacagaggcacctaagctgagttcagggaagagcaaagtagcctgttttggccaataggtgacaggaaatagctgtagttgcaatggaccagaccctctagtatattgcatgccagaccaagaccaagaacatgtggccatccttaataaggagaaaggagccattgaaggtttttgtttgtttgtttgtttgttttattgagatggattctcactctggtgcctaggctggagtacagataatatagtctaaactatattgtttagaccaccttctcaagtcacttaccagctcatgttgattaacatgtccttttgtccctttccccatttgctgtctgttctacagatgtgaggctggggctgaggcagccatcttgtgaccatgaggagcacaaagatggaaagaatctgggtcttccacagacctcctgcctatgagtcaatcttgatctagctagtttgagtttctgctgttttgctaatagagtttctaggacctcaaggagaaggttggaatatactggaatatactgagatggagtccatcccagaaattaggatggacaaccgggactaagagggaatgttcattttatgcatgccaaactctactcacaatgcagcccaaacagcaaatttagcaaaaattccagcctgtacccttggaggatgggcaccaaggttgggctgctcccacttttgtttctcaagaatgactataaaaaagcttttacaatttttggctggatggacctttaggcacattccaagttcttttttcccgaggttttgccagatatacttttatttgttttttatttgtttttatttgatttttaaaaaatccttaagtttttccttttcttttctttttttttttttggacagagtctcactctgtcacccaggctggagtgcagtagtgtgatcttggctcactgcaacctctgcctcccaggttcaagctattctcctgcctcagcctcccaagtagctgggattacaggcatgcactatcacacttggctaatttttgtacttttagtagagacagggtttcaccatgttggccaggctggtcttgaactccccgcctcaagtgattcacccacgttggcctcctaaaatgctgggattacaggcatcagccaccacacctggccaaaaaaatccttaagttgttctaatacacgaacttcctagttagcactcaggccatacacacaatcaggcccacgtacccaatttccaaggtctctcctcgaatcagacgtaacttccggaagaaggaaagtgacaccagagcgtaggatcggcggatttttagataccctgaaatttcttcaatgaggccgaggttggcttctagctcagctgccagattgtctaaggaaaggagagaatatccagtgggtttctatagacatatttcaatcttctcatgattctccatggtgagaagataaccctcaggctgcaaatgactggacatacccagctcaaaactcatcatgcttagaacacaatctgaagtccttagcattccttaaatgggtcaagcatacttctgccccaggaccttggcactggctgcgtctgttgctcagaatattattccaccatatatctccttggcttgttccatcatcatctcaaaccctcctttcccataccagagacttctctaaaatagcaacccccagcttggtgctggtggctcatgcctgtaataccagcaccttgggagggcgaggcaggtggatcacttgaggtcaggagttcaagaccaccctggccaacatggtgaaaccctgtctctactaaaactacaaaaaaaaaaaaaaatagcaacccctgttagtctccattttagaggttgacaaatgacagcccactggccaaattctacctgttttgtaaataaagttttattggaacaaagccatgcctgctagctgacatgggtctatggctgttttcatattacaacggcagagttgagtggttacggcagagactgcccggcctgccaggctgaatatattcatgaaagagccctttatagggaaaagttgcccatttccattccacctattaccctgctgcacttcccttcacagcacagaccacaacctgaccttacaatatctgtcgatttacttatgcgcaaaaatccatcaaggtaaggactttcccttactcactgtgagtattcagtacatgttcgctaaagaaataaacaaaggaatgcctttttgcctgacatggtatttcttttctttttttttgaaatggagtcttggtctatggcccaggctggagtgcagtggtgtgatctcggctcactgcaacctctgcctcccaggttcaagtgattctcctgcctcagcctcccaagtagctaggactacaggcatgtgccaccgtgcccagctaatttttgtatttttaggagagacaaggtttcaccatgttggctggtctcaaacttctgacctcaagtgatccgcccacctcagcctcccaaagtgctgggattacaggcatgagccacagcgcctggctttttttttttttttttttttttttgagatggagtctcactctgtcgcccaggctagagtgcagtggcgcgatcccagctcattgcaacctccacttcctgagttcaaacgattctcctgcctcagcctcctgcgtagctgggattacaggcacgcaccaccaagcctggctaatttttttgtatttttagtagagacagggtttcaccatgttggccaggctggtcttaaacttctcacctcacgtgatccacctgcctcggcctcccaaactgttgggattacaggcatgagccactgcacccggccctgagatttatttctgaaaacacagcctgcagttctgcaatagggcatattgcttgattgttaaaaacgacgattccaaagccaggtggggtggctcatgcctgtaatccctgcactttgagaggctgaggcaggaagattgctcgagcccaggagtttgagaccagcctgggcaacatagtgagaacctggccctggaaaaaaattaaaaaaaaaaaaaattagcccggcacagtgacacctgcctgtactcccagctacttgggaggctgaggtaggaggactgcatgagcccaagagtttgaggctacagtgagctagagttgccccactgtactccagcctgggcaatggagcaagaccccatctctaaaaataaaaataaaaataaaaataaatgtaaatgcagattcctgatgccccaactcccaaagtagaaaatgagaatctcaaggttagtaaggccaagactgagctgttcatttcaggttttgaggcagactcccagcatggttctatccatgggggagccactgaacgaccatcctaaaagtgctgtaggagcacgcagcagggtctgcactgcttttcttccccgctcacagctcagagggacatggagcccaacaggcacccccgacgcccacacagagacactcactgcctcctcgaatgttgatgatcagactcccgttgatgacggtgcatcctcggagctcctgggcagacgtcaccgagtcgatggtcttctcgccttctaggaggtggcacaccttgggacagggacccaggcatggggtgcacagcaagctaaggacggagcagagagagagagaaagagaaaggggaggggggtgtcacggtatccaaggtccttcagacatctcaggcatctttctgcctgatatggtatttctttgtgtgtgtgtgtgtgtttgtgtgacagagtctcgctctgttgcccaggctggagtgcagtggtgcgatctcagctcactgcaacctctgccttctgggttcaagagattctcctgcctcagcctccacagtagctgggattataggtgcccgccaccgtgcctggctaatttttgtatttttgagtagagacggggttttaccatgttggccaggctggtctcaaactcctgacctcaagtgatccacccgcctcggcctcccaaagtgctgggattacaggtgtgagccactgcacccggccctttctgcctgagatgatatttctgaaaacacagtctgccgatctgcaataggacatatcgcttgattgttaaaaatgtagattctggagccgggcgtggtggctcctgcctgtcattcctgcactttgagaggccaaggagggagggttgcttgagcctgggagttcaagatcagcctgggaagacagcacactatgcagggtctcaagtgatggcataagtccatcatgctacggcaaggtcttctgacctcagcattgttcacatttggggccaagtaattctccactgtggtagtgggggtggcgtcctatgcattggaggatattgagcggcatccctaggctccactcacgagctgccagtagcatccctcccacaagttgtggcaattaaaaatgtcctccaggccaggcaaagtggctcacgcctgtaatcccagcactttgggagtccgaggcgggcagatcacctgaggtcaggagttcaagaccagcctggccaacatggtgaaaccctgtctctactaaaaatacaaaaattagctgggtgtggtggcacgtgcctataatctcagctactcaggaggctgaggtaggagaatcgcttgaacctgggaggcagaggttgcagtgagccgagatagcaccactgcactccagctgggagacacagtcagactccatctcaaaaaaaaaaaaagtctcccaacattgccaaaagtcccctggggagggaggatgccagattgtccccagaaaagaaccactgccttaagtgagagaattatgccattaccctatggttgcaggtcctcttgcttttaccccaaagtgacaagactcatattttaccccaaagtgatgggacaggactcctgctggaccccacagtgatgggattcacaccatatcccatggaggcaggaccatgatctaccctgtgcgtgacagcaatgggactcatagcattatcgtggcgatatgttttggatctgtgtccccacccaaatctcatgtcaaattgtaatccccaatgtgggaggtggggcctggtgggagatgactggatcatggtgggcggagttctcatgaatggtctggcaccataccccttggcagtgtatagtgagtgagttctcacgagatctggttgtttaaaagtatgtagcaccagccgggcatggtggctcatgcctgtaattccggcactttgggaggccaaggcgagcggatcacttcaggccaggagttcgagaccagcctggccaacatggtgaaaccccgtctctactaaaaatacaaaaattaaccaggtgtggtggtgcccacctgtaatcccagctactggggaggctgaggcatgagaattgcttgaactcaggaggtggaggctgcagtgagccgagattgtgccactgcagcccagcctgggtgacagagtgagaatctgtctcaaaacaaacaaacaaaactatgtagcaccttccccctttctctcttccttcagtcatgtaagatgtgcctacctcccctttgctttccgccacgattgtaagtttcctgaggtctccccagaagcagaagctgctatgcttcccgtacagcctgcagaactgtcagccaattaaacctcttttctttataaattacccagttccatgtattctttatagcagtgcagaaatggactaatgcatgtggtaataagaatgtgccgttaccttgagatgatgggcctgatgtggcagaactgacagttaccccaacgtggcagaattcaacctgctactccaaggagacaggacatttgctgttctgtgtgggatgtgatgcaactacggctgtaacatgaccccatgtttaatggcaagtgacttgggcagcctttggttttgccagcctgcagcctgatgccatcaaactcacagcccccaggagtcctttgggaaccagtcctccccaacacggggtctctgagatcagttcttggttgccaaagcccttctagatccaggatgggcacaagatccaagccaagctgagcaccaccttctattcctgtgggggctcagaggtggtgggtacagaacttaagtcagtgcagtgagggttttgctagaacatgctggaaggggaaattgtcttccttctggagtatctaagggttttgccatcttgctagcatggggtgaagggtgagggagaagctgcctgataacaaaaccaacaaagaggaaaataaagatgaaggagactgatcaggtacatcgcttaagcttcttgatacagctatacctgaaccaactccctgaactttttggttatgggtaccaacaaactcctttaatcttggttaagtcaatggtttttttgttttgtttttgtttttgttttttttaagatggagtctcactcttgttgcccaggctggagtacaatggcacgatctcggctcactgcaagctccgcctcccaggttcaagtgattctcctgcctcagcctcccgagtagctgggattacaggcatgcaccaccatgccccatctaattttgtattttttttttttttttttttttttagtagaaacagggtttctccattttggtcaggctggtctcgaactcccaacctcaggtgatccacccgcctcggcctcccaaagtgctgggattacaggtgtgagcaaccgtgcccggccagttaagccaatttgagttggggttctggtgcatgaaaccacaagattcccaactgttacagtctccatttcttcatctgaaaataacaccaccaacgccacagcttgtgatgaggaactcaatgaagcataccacaaaagcacttcgcacacagaacgcaattttatccgttgctacaagggtcattttttattggtggcatccttgttgctgctgctgttgttctcacactcctgggtattcaactcttcagagtgatttttgtgactgtaggatcataaagtatgtatctggtcttcatcccggttcttggcacagagcttcaaaaacccttggaactttctgagtcacaggaatgcttttgttaggagtgttaggaatgtcggggtgacttgtgggggggggggtgcctagataacatgagggtggggggcggtcaccagaaagaacaaccctgtgatcagagggttggggcttttaggacctccagggagatgagggggctggaaatggcagtgttgaatcacatggtcaatgatttcaatcaatcacgcctaaggaatgagactccaattaaaactctggatactgggccgggtgcagtgcctcacgcctgtaatcctagcactttgggaggctgaggcaggtgaatcacgaagtcaggagtttgagaccagcctggccaacatggtgaaaccctgtctctactaaaaatacaaaaattagccgtgcgtgatggtgcatgcctgtagtcccagctactcggggggctgaggcaggagaattgtttgaacctgggatgtggaggttgcagtgagctgagattgagccactgcactccagcctgggtgacagagtgagactccgtctcaaaacaaacaaacaaacaaacaaaaactctggacgctgaagctcagtagtacttcccagctggtggacacaccagtatgtcaagagggtgatacatgctgttgccacgaggaggcaatatggaaattctgcatctagaactctcccagatcttgccgtatgtgtatcctttataataaaactgtaattgtatagcagggtttttaaatttgagacaagatcttgctctgccacccgggctggggtgcactggcacaatcttagctcactgcagcctcgaactcctgggctcaagcgatcctcctgcttaagcccctcaagtacctgggactacaggcatgcaccccctcacctggctaatgtttttaaatttttgtagagatgggatctcactatgttgtccaggctggtctcgaacctctgggctcaagtgagcctcccaccatggcctcccaaagtgctgggattacaggcatgagccaccacacctggccaggtttattttcattctgtgagttccttctagtaaattatgaaacccaaacagtttgtgggaatcccccaatttagagccagttagtcagaagtgtgggtggctgggggatccccaagatgctgccagtgtctgaagcaagggaaatctcatggagggctgagccttaaacttgtggcgtctgatgctaactttggaggaggatggtgtcagaacggtgttgcaagtacacccaggtagtggcagaacagctgaggcagaaacaaaatactgaccaaatgtttgacttcttttattgcctctattcttattatgtggcaggcaatgctctaagcctggagttggcaaacagtgggctgggagccaaatccagtaggccacctgtttttgcaaataatatcctattggaatatggccacatttattggttagtacatcgtctaaccctgctttcacgctgcaaaggcagagttaagtagctccaacagagaccatatggccctgagagctgaaaatatttactatctggcccttggccaacccccgttctcagctgccggtatacatgagtgaacaaagcagataatatgctttcccagtgggaaattataaatgaccatgagttctttgcagcctctcccaccaagaagtggagtctatgttcccacctgttgaatctgggcttggccatatggcttgctttggccaatggaatatttgcaaacgtgatacaagctgaggcttgaaaagcacttgaacattgaggtctgcccttcctggctgctggggtaagagacttatggagagagacccccactgaccatcaaagacacaagaggctcccctaaaccatcagccgtagctaaacaggcccaggccagacaaaccttcagtcaacacatgaaatcatcagagctcctaaaggagtgttttaagccactaagcactgaggtggttttgttacgcaacaagagctagctgatacactcacaaagcttatcatctggttggggagagtgaataaattgacaacaaaggctaggtacagtggctcaggccctgtaatctcagcactttgggaagccaaggtgggaggatcacttaaacccaggagttcaagacgagcctggggaatatagcaagacccccaacactacagaatttttttttagccaggtgtggtggtgtgtgcctatatagtcccagctactcaggaggctgtggcaggaggatctcttgagcccagggggttgagaccacagtgagccatgtgggtgccactgcactctagcctgggtgacagaccaagaccttgtctcaaaaaaaaaaaaaaaagacaaaaatatcagctagtgacaaatcgaagagttaaaactaaatgatgtgacagagagtgcacggatgattgactcagacgggaaggatttgccaaggaggtgacttttaagctgccatctagatgacgaggggaaaaagtggatcattctcaaatgcagggacaagcattataggaagagggaacagctaattgaaaggcacagaggaaagcggatgtagcaagttgcaggaaaagctcctgcggtaacgaccaccacggccagggggcaccggaatgaaatgagaatgagaactggccgagccctcccgatgaggagtttggattctgtccattggtcttgggaagccaccggagggttttagggaaggacatggcatatgatcagatgaccacttttattttttcttttgagacagagtctcactctgtcaccgagactgcagtgcagtggcacactctcggctcactgcgacctccacctcccgggttcaagcaattctgctgtctcagcctcccgagtagctgggattacaggcgcccactgtaatcccacgcctggctaatttttgtatttttagtagagatggggtttcaccatgttggtcaggctggtctcgaactcctgacctcaggtgatccacccacctcggcctcccaaagtgctggggttataggcgtgagccaccgcgcctggcccaggtggccactttttaccagtgtcactagaatggaagcaggagcaaagagattgttcaaggggactgggtcagaccagacatgatggtgaaatagatggaggtgtagacaaatttgagacctcagcttaataggaagaagtgagagaggccaagaagaatcaaggattttaggtaattctccccttcccagtggataccccatacgcattgaaaatttattcatcacaaatatctggtccttctcatctcaggaagcagcactgtgctattacatcccagcaggtactttggaacgacagtagatggtgagacctttttttttttttttttggagatgcagtttcactcttgtcacacttgcctgggggctaacgtgcaatggcgtgatctcagctcactgcaacctctgcctcctgggttcaagcaattctcatgcctcagcctcccgagtagctgggataacaggtatgcatcaccatgcccagctaattttttttttgtttttgtatttttagtaaagacggggtttcaccgtggtggccaggctgaccttgaactcctgccctcagatgatccgtccacttcggcctcccaaagtgctgggattacaggcataagccactgtgcctggccaaggccttttaacatgggttcccagaactctgctctgaaaacatcaagaactccttcccagataagccaccagaatggaagaaaacatctggccctatttgatatcaaaccacattagaaaatgccacagtacgattaagtctttcataagataaaaagaaaagcttcaggccaggtgcggtggctcatgcctgtaatcccagcactttgggaggccgaggtgggtggatcacttgaggtcaggagttcaagaccagcctggccaacatgatgaaacccggtctctactaaaaatacaagaaaaatttagctgggtatggtgacagatgtctgtaatcccagctacttagaggctaaggcaggagaatcacttgaacccgggaggctgagttgcagtgagccaagatcgcaccattgcacttcagtctgggcaacaagaatgaaactccatctcaaaaaaacaaaagcacaaacaaaaaaaaattggccaggcttgctgcctcacacctgtaatcccagctacttgggaggctgaggcaggagaatggcttgaacctggaaggcagaggttgcagtgagctgagatcatgccactgcactccagcctgggtgacagagtgaggctctgtctcaaaataaataaattaattaattaaaagcttcagaaataaaaatattaatttttttaaacctacgcaataaaatacggtgacaatgcacccccctctcctttgttttcttccgttcaggaaaggtcccagataccaaggatgtgcggtcaatttctcagggtttctgttttagcatctcccgcatcatcagtgagaaaatcaaaggaggttgctatatttctcaggccattgttaaggtgagggaaaaatgccttttatttaaggccaatgtcttttaaacaaacatcttgccagaagatattaacccattttttttatttcaattgtgattttaaaaagaaagaaatgaatcaaaaggaatatggtcatttcctcaatcttgggaatacactggccaaaaaaaaaaaaaaaaacctaaaacaaaagtctgtctggtatgaaaaggtgatttatagacccttttggtcaataaagccaaaaggtttttttggtaggtttttatcaacaacgagcaaaacaaaacatattgtacttgcaggtttcacaaacactcaaagaaagagtcataagaactgaaattacagcttgttttccttcccgccctctccacccagggaaatacaatttcccaccccaacactctcgcttggctaattctcaagtctgaagaggaagatactttacgtaagcaggtcagctcaaggcctcttgatgtgtgtctgtttctgatttgtttttgtgttgttttgtggtgtgtgtgtgtgtgtgtgtgtgtgtgtgtgtgtgttttaaaacaaaacataaaacctcaatacaaaaaccaggaaacagatttttgcaactcagttacggccccaaaatagctcatggaagaagctcacagtacgaacagaaagtctgcgatgtgcgtaggaaatctgactctgtcgaagagagaaaaccctgctatttctcacccaaacggcaggaaatggtttgattatactgtccttcagagaacagcaaagccctgagaataatgcagaagcgagtctcttcctcctggagacagtatgttctgggctaatcttggcacaccaccaggctacaggtcagggaagacacgaaagaccttggtatatcctttatgtgacaatgatgaagctacatcagtgaggacaggccacgtggaggattttagggaaaaccaaggactctgtccttattatattttcttgttctgaagccaaccacagaaagcttagaactgaggtccacaatgccagactgggtgcggtggctcacacctgcaatcacagcactttgagaggccaaggcaggtggaccacctgaggttgggagttcgagaccagcctgaccaacatggcgaaaccctgtctctattaaaaatacaaaaattagccgggcatggtggcaggcacctgcagtcccagctgcttgggaggctgaggcaggaaaatcgcttgaacccaggaggcagaggttgcagtgagccaggttcgtgccactgcactccagcttgggagtcttgcggcaagactccatctcaaaaaaaaaaaaaaagaatggtgggcacaatgccagaagtatatactatctggtcctttagagaaaaaggtagtcaactcccactcccaagcccaggaccaaaacagggtgcaaaagtagcatctgagagcagagacctcactcatagccaattaaccctgggtttgcacacagttttaacaagcggcatcgtcacaaccaaccccacgttccttctcctctcggctgccccccagacccacatccagaactcacttgctggaattcatcgtgtacccggagggacactcagggatgcacttgttgttgtgaatgacgtactggtggcagccctgcctccgcgagttcttgcatttgtggtgcaggtcctggcagaagctgaagttcacacagcgccagtcctggaagtggtagtacgggggcgggcaggtctccacacacctgccgtccaggtagaagttgcggcaggccacgcacttggtggggtcgtcgggctgagaacagttgcccaggcactcgctgtggcaacagaggccttcggcggtgcagccgtgtgacttacagatggtcgggcaaactggagagagagagagagagagagggaaataaataaataaataaataaataaataaataaataaataaatggctttgtccaattcctgtctgcatatgcagcaattctggatcagacagtgaaagccaaccaaacactaacagtaaaagcggcacgtctacatcattacccacatgtcagacacatctattaactggtttaagcctccaaaccattggtgagcttgtaaatgtttaacagctgcctgagggaggggcccagggaggcccagatttatatagcatttgccgatttccatggtgtaaatattcctaccagtggtggatttcaggccaccaacatgaagttactaaacataagctgacaaaagatacacagtagcattcctctaagtagtatttataagtatacacaaaatgtatctactattgacacaaaagtagtaaataacctcaacagcacaaataataggaaaacatcgtatgatattaggaggtggtgagttttgagtatttgttacttttaaaaagctttgttaatttaaaaacttttgtttttaatgtaatttgtttaactgtaggtttatgtaatttttatgaatatctatgtttaacaaatggctcacaaattgcctgaaaatttcaccactggctccagcaagccaactccagcatgctgctgcaccccacatgtgaagtagatacactgttagctcctttatttttttgttttacaaatggggaaactgaggtacagggaggttaagtaacttgcccccaaaccactgattgcttcaacagacatttgcttgcactaatctagatactgtggccactgtggggaaaaaagtggctgcagatcctgcctttgggagcacaaggtctaatggaggagacatgttagttacttaaacatgcaaatgtggctcggtgtggtggctcacgcctgtaatcctagcaatttgggaggtcgaggcgggtggatcacctgaggtcaggagtttgagaccagcctggtcaacatggtgaaaccctgtctctactaaaaatacaaaaattagctaggtgtgctggtgcatgcctgtaatcccagctgctcaggaggctgaggcacgagaatcacttgaatctgggaggtggaggctgcagtgagccatgatcgtgccactatactccagcctgggcaacaagtgcaaaattctgtcaaaaaaaaaaaaaaaaaagagagagagagacaaagagagagagaaaaggaaggaaggaaggaaaaaaaaaaggctggttgtggtggctcatgcctgtaatcctagcactttgggaggccaaggtgggcggatcacctgaggtcaggagtttcagaccagcctggccaacatggtgaaaccccatctctactgatgatacaaacaattagccgggtgtggtggtgggcgtctgtaatcccagctactcaggaggctgaggcaggagaatcgcttgaacctgggaggggaggttgcagggagccgagatcatgccactgcactccagccttggtgacagagggagactctgtctcaaaacaaaaaatgaaacaaaacaaaaaataagaaagaaagttggggagtgttcttcaccccaaatccccagactgtgattctcagcacagtggatcccaccggccaaactcagggaacagaagtggccccagaagctacatccatatatgaacagcaccatctggtcgaaatttctgcgatgacggaaatgttctctatctgggccatccaacatagtagccacttctcccctgtggcttctgaatgtgcttagtgcaactaggaaatccaattttttttttaattgtggtaaaatacacatagcataaaattcaccattgtaatcatgtttaaatgtatagttcagtggtattaaatacttttatgtggctatgcaaccatcaccaccacccatctccagaactttctcaccttaaccaaactgaaactctgcccccatgaaacagtcacactcatcctcctccccaactcctggcacctgccattttactttctttttcttttctttttttttatttttattttttgagatggagtcttgctttgttgcccaggctggggtgcagtggcgcgatctcagctcactgtaacctctgcctcccgggttcaagtgattctcctgcctcagcctccagagtagctgggattacagacgcccaccaccacacccagctaatttttgtatttttagtagagatggggtttcaccatgttggccgggctggtcttgaactcctaacctcgtgatcctcctgcctcagcctcccaaagtgcagggattacaggtgtgagccactgcgcccgacatcccattttactttctgtctctgtgactctgatgactctaggaacctcatataagtggaataatataggatttattcttttttaaaaaatttattttgagatggagtctcactctgtcactcaggctggagtgcagtgactcgatctcggctcactgcaacctccacctcctgggttcaaggaattctcctgcctcagcctcgagtagctgggattacaggtgcccaccaccacaccccgctaatttttttgtatttttagtagagacggggtttcaccgtgttggccaggctggtctcgaactcctgacctcaagtgatccactcaccctggccccccaaagtactggaattacaggtgtgagccactgtgcccagcctagctgcagtattttacattcccaccaacagtgtaccagggctccaatttttaccaaggaacaaaacttttaactgcatttcattttaatttcagtttaaaatttttaaaaagttttacattgatacagaatattttacacatttatggggtacttgtgatattttgtcatatggataaaatgtgtaacgatttcttttttgggtgtgtgatggggtctggctctgtcacttaggttctggggtacagtgacacagtgacagttcactgcagcctcaatctcctgggctcaggtgatcctcccacctcggcctcttgggtagctggaataatggacatgcgccaccacgcccagctaagtgtttaattttttgtagaaatggggtctcactatgttgcccaggctggtctcgaactcctggctcaagcgatcctcccacctcagcctcccaaagtgctgagattacaagtatgagccactgtgcctgacacaattccaatgtttactagccacagatgactaccgtctcccagacgagacagttcaggcatacagaataaaagccaactccctacaggccttggggggtctaatccctgccagtcttgctaaattcttctcccaggctggcctcctttctgcacctcccacccacacacacccaggctcagccctaccttaggaccttgcacaagctgttctgggtggagcaccctggtcccttgtccccttgtgacttgctcctttgcatccttcaggtccttacacagatcttccctgacttccccagcagaagtcgcccttcctgctccattcataagctaacacattatctcattacattttccttatggcatggatcactcttgaaaattatcttggggctgggcgcgggggctcacacctataatcccagcactttgggaggctgaggtgggtggattatttgaggtcaggagttcaagaccagcctggccaacatggtaaaaccccgactctactaaaaatacagaaattagctgggcgtggtggtgggcgcctgtaatcccagctactcagctactcagaaggctgaggcacaagaatcacttgaacctgggaggtggaggttgcagtgagctgagatccactgcactccaggctggctgacagagtgagactccgtccaaaaaaaaaaaaaaaacaagaatattaggaagttctaatagggctaagcacagtggctgatgcttgtaatcccagcactttgagaggctgaggtgggtggaccacttgaggtcaggagttcaagacgaccagcctgaccaacatggtgaaacccgtctctactaaaaatacaaaaattagtcgggtgtggtggtgcttgcctataatcccagctactcgggaggctgaggcagtagaatcgcttgaacgcaagaggagtttgcagtgagtcaagattgtgccactgaactccagcctaggtgacagagcgagactctatctcaaaaaaaaaaaaaaaaaaaaaaagggaggggggattgttaataagagtcccttccttccttcttaaggctgttgcaagaaataaacaggatgacgtcagtaacacatcagattctttgatagagacatttttaggcttgatagaaattaactacagagggtatctataattatcataattatcaacatcattaacactgatctgtctgtgggaacctgagggctgaaattcaattgaaggaagcaatatacaaggcagacaacaatgatccaggacccacggagttccagcactctggcaaggaaacacacacacaagaggaaggggcttgtttcctgggctggagccacttcagagggtcagccctttcattcaaaagaggcgtcatcaatggcctaacacaaacctctcaaacacataagtccttccggcctagacaatgggaagaaaaattatccaaccattgcaaacaaggccagaggctgcgagactttgcaatcctgtgttggagccctagctgacaggcctatctgagctatttcatttgtcagcacaggagttggtcaactttttctgtaaagggccacaagcaaatacttgaggctttgcaggacatatggtgttggttgaaactactcaactctgccacgatggcatgatagcagccacagacatatgtacatgaagaggcatggctaggtccaataaaactttatttataaaagcaagtgatgggccagatagtttatcaacctgcactagttaaatgtacctgtaattgattttactattactttttttttttttttttgaaaccgagtcttgctctgttgtccaggctgaagtacagcggtgccatctccgctcactgtaaactctgtgtcccaggttcaagcaattctcctgcctcagcctcctgagtagctgggattacaggcacccacaaccatgcctggataatttttgtatttttagtagagactgggtttcagcatgttggccagtctggtcttgaactcctgacctcaagtgatctgcccaccttggcctcccaaagtgctgggattataggcatgacccactacgcctggccgattttactatttctattaggaactagactcaaggaaattagagttaacttacagacagatatgctacaaattattttcatctcagagaaaagatactctcagctgggcatggaggctcatgcctgtaatcccagcactttgggaggctgaggcgggaggattgcttgagcccaggcattcgagaccagcctgggtaacagagtgagatcctatctctccttgccgaaaaaaaaaagaaaaaaatcatccccaaagattacagttttattgtcctatgggacattaagcagcctcacagctaacactgccttcttatttcagtgactatacatgttttggctttataatcctgctgttccctcactaatgggttaaataaacatgctgacctgtgttctttggtggtttttttttttttttttttttgagacagagtctcactctgttgtccaggctgaagtgcaatggtgagaactcagctcactgcaacctccgcctcccgggttcaagcaattctctgcctcagcctcctgagtagctgggattacaggcgcccgtcatcacgcccagctaatttttgtatttttagtagagatggggtttcaccacgttggccaggctggtcttgaactcctgacctcgggatccacccatcttggcctcccaaagtgctgggattacaggcgtgagccaccgcgcccaaccaattctttgaagactatccttcgaacactataagctcattccaggtgtttccaactctgtagggagatgttgatcaaactacaaaatttcacttaggagaaataagctttagttatgtattggacacaatggttgctataataagtaatagtgcactggacatttcaaaattgccaaaaatgtagatatttttaaccataaaacaatgataagtatgtgaggtgatagcttttaaattggcatgacttagtaattctacaatgtaaacagatatcaaaacatcacatggtaccccataaatatgtaacatatacaattattatttgtcaattttaaaaaaatagaggctgggaacggtggctcacgcctgtaatcccagcactttgggaggccgtggcaggtggatcacctgaggtcaggagttcgagaccagcctggccgacatggtgaaaccccatctctactaaaaatacaaaaattatacaggcgtggtggcaggtgcctgtaatcccagctacttgggaggctgagacagcagaattgcttgaacccgggaggcgggggttgcagtgagccgagattgtgccactgctggaagagagagtgagactctgtctcaaaaagaaagaaaagaaaagagaaagaaagaaagaaaaagaaagaaagaaagaaagaaaggagggagggagggagggaaggagggaaagaaaagaaagaaaagccactcggggtggccactgcaccccctagctgagtgggagtcctctaaactggtgctggacgtttccacatactcttgctccccatactggttcctctgaactcggattgttagacagaatgtgaaaagctccacatgaaaatcacaagcctgccaggcgcagtggcttgtgcatgtaatggcactttgggaggctaacacgggaggatctcttgagtccagtagttcaagactagcctgggcaaaatagccagacccctgtctctacaaaaataaaaaaattagccaggtgtgatggtgcacacccgtaaaccaatagtcccagctactcgggagactgaggtgggaggattgctacagcccaggggtttgaggctgcagtgagctgtgactgcaccactgcactccagcctgggcaataaagcaagaccctatctttaaaaagaagagagagagaaaagaaagagagagtgaaagaaggagggaaggaaggaggaagggagagagagaaaagaaagagaaagacagaaagaaggagggaaggaaggaaggaaggagagagataaaaagaaagaaggagggaaggaaggagggagggaggggagagagagagaaagaaagaagagggagaaagaaagagaaagaaagaggcaggaagggagggagaaagaaagaaggaaagaaagagagaaagaagaaagaatacagaaagagaaaaaagaaaagaaagagggagaaagaagaaagataagagagagagaaagagaaagaaaaagaaagacagagaaagaaaagaaaaaagaaagaaaaagaaagaaaggagaaagaaaagaaagagaaagaaggaagggagggagggaagaaaagaaaagaaaagaaaagaaaagaaaagaaaagaaaagaaaagaaaagaaaagaaaaaaatcacaggcagcccaggctggggaaagggcatgacacagatgaactagccacaaaacagcagcttcttctggtgagagagaccgcaaagtgaagacattatgaaagccacgtgtcatgcaagatgagaaacagccccagtggaggacggggttgactttcctctccctgtgcccctgacctgatccccctcattgacacgtaatgagcccaagtgtccgttcctgcccaaattctggtttggggtagggacagtcagcagcccaggctatgtctgccagacaagatggcagacttgcaggaaaatgccaaaccgtccgggggctgtcactccctcacacctgcacacaagtgctgctgtgtatgtagggaacatctacccagacctcccctctccaaaaatgcaagttctgtgtccatccgctgtctccccttcaaagccacattgagctgctggtcccaattttcccccagttctccctaaacctcccaaaagctcctgggtgagcacacagaagcaactatcatcttcctgaaactttcagctgcggtggctttttcactatacactgctgagaagatcagggactaaaatctaactaagttgacggaggagaaaggagaccgctgtgtcagagtcctctggtggaccctccccaagaaagacaatgtccccactaaaggaccccttccctagacagagggagtcacagaaacaccaatttgcttcagggaggcagttcaaagcaaaggaacgaatcttgcaccaagaggcaagtgcaatttgatgcagtatttcttttttttctttttttttttttccccagatggagtctcactcttgtccctcaggctggagtgcagtggcacgatctcagctcactgcaacctccgcctcccgggttcaagagattcttctgctcatgcctgtaatcccagcaggctaaggaggctaagcctgggaggctaaggtgagcggatcacgaggtcaggagagccaaaccatcctgaccaacatggtgagactccgtctccacgaaaaatataaaaattagctgagcatggtgtcgcgcacctgtagtctcagctacatgggaggctgaggcaggaaaatcacctgaacctggggagcggaagttgcagtgagctgagatcacgctactgcactccagcctggcgacagagtgagactccatctcataaaaaaacaaacaaaaaaattaggggcaggaggggggaggacacatgggacatatgtccctctgaaagggacacaaaaaagtgccctattttatttttattttttactatgtatgtgtactatcctgtcaaaactgacatatatttggaaatacatatttttttcaagtagcttcttctttcatttatttatttagagacagtgtctcactctgtcgcccaggctggagtgcagtggcatgatcttggttcaccgtaacctccgcctcccaggttcaagtgctcctcctacctcagcctcctgagtagctgggactacaggcgtacaccaccatgcttggctaatttttgtatatgtatatatacatttggtagagatgaggtctcacaatattgcccaggctggtcttgaactcctaggctcaagagatccgctctccccgagctcccaaactgggcataggcgtaagccacaatgcccagccaggaaatacatttttcaaaagcctctgctagacagtaaacaatgttattgatcagttacatgattctactcccaaatattctaataatgacaggcatcggtgagagcttttacaaaggttctcttaaaatcatctttgttggctgggcatggtggctcacgcctgtaatcccagcactttgggaggctgatgcaggaagatcacttgaggtcaggagttcgagaccagcctggccaacatggtgaaacactctctattcaaaatacaaaaattagctgggcgtggtggtaggcacctataatcccagctacttgggaggctgaggcaggagaattgcttgaacccaggaggcagtcgttgcagtcagccaagatcgtgccactgcactccagcctggacgacagaatgagacttcatctcaaaaaaagaaaaaaaaattatctttgccttattacaaaatcaatatggggctcaggggtgaagtgtggagtgtgttttaataatagctttgcttttttttttttttttttttttgagacaaaatctctttctgtcacccaggctggagtgcagtggtgcaatcttggctcactgtaacccccatgtcctgggttcaagcgattctcctgcctcagcctcctgagtagctgggattacaggcacacgccaccacaccaactgattttttttttttttttttttttagtggagaagcggtttcaccatgttggccaggctggtctcaaacacgtgacctccgtctgccttggcctcttaaagtgctggtacaggtgtgagccaccgcgccaggccagctttgctcttttatggactattcaacaaattgttagcatttctcttttttctttttttcattcaacaaacacatgtcgaatgtcccagtgtgccaaatcataggaaacctgttctcgtattaaatgaaaaagcatcagaacatagatgacacaaaaaccccatcccctgtcctcgagacatccaggtttagcattgtcctcagcccccagcagcatcccctcctgcagggggaaaagaaaaggaaaaaatcccacagtactagaaaatggcaagagtaaatcttgttgtgggaaacttttcattcaggtatatgcatgtcttgggtactgagccttacgggaaatgtatttcttcttaaaaattctagttaaaaatacttcaagtaacattgcccacaatagtgggacaaggcaacaacacgtacttcccattatgaggcaatgaaaaagacaaaatatttgtgtagctttctttccatatattactaaccctagcttgaggtcattcgataaaataactggcctgtgctcttcaaaactgccaatgttggccaggtgtggtggctaacacgtgtaatcccagcactttgggaggctgaggcaggaagatcactggagatcaggagttcgagaccagcctggccaacatggtgaaaccctttctctactaaaaacacaaaaattagctgggtgtggtggcgcatgcctgtaatcccggctacttgggggctgaggcaggagaatcacttgaacccaggagacagaggttgcagtcagccaagatctcaccactgcactctagcctgggtgacagagtaagactccgcctcaaaaaaaaataaaaataaataaataaataaataaataaaagccaatgttgggaaagacacagaaaactgaggaattgtgcggacttaagagacagcagcattcaaatgcaaagtgtgatcctagattggaaccttcgcctaggaaaaaaaatctatatagggcaatattgagacaacagataagattatagaagacattggattaaaatactgtatcaatgttaatttcctgattttgacaacggcaccagtaccatcattatgtaagagaactttctttcttttctttctttttttttttttttttgtttgagacggagtttcgctcttgttgcccaggctggagtgcaatggcaccatctcggctcactgcaacctctgcctcccaggttcaagcgaacctcctgcctcagcctcccgagtagctgggattacaggcatgtgccaccacgcctggctaattttgtatttttagtagagacggggcttctccaagttggtcaggctggtctcgaactcctgacctcaggtgatccgcccgcctcagcttcccaaagtgctgggattacaggcatgagccaccacgcctggcctcagaactttcttgttcttaggaaatatccactgaagaattaaggagtatgtatcatgcctgcaactaactctcaaatagttcaggggaaaaaaatgtatataatgtgtgtgcataaatatattagaaaggtaataaaacaagtagaataaaacgtaaacaattgattgatctagatataatcttgcaatttttccgtaagcttgaaacgacatcaaaacaaaaagcgaccaatttgtccaaagcaaggttaaaagccagagaaataggagacgcagcgctgcattgttaaatgacttgcgcacaaaaatccagtcactctgacacttttttgtttgcctcccttttaaagttcaaattagtttgggtttttcttaattaagaaggtatgtgataaaaaacaaaacagaaaatacagaaaccaccattaaatgattcgatagctccacatatgttaataacattttgttacattctttccaaagcttaaaactttccgaagtttaaaaaaaacttaaaaaaaaaaagtttaaaaacctttccaaagtttaaaaaaaaaatactcaagatttatgattccaaaaattactgctttccagaaatttccaaacggaacagttgcgtcatgggcctgctggtacattgaccacagggccccgcggctctccctataagtgtgagttttataaactccttaaagtaatttattttgtttccattcaaggcctttctctcccacactggccccagaccctgacctcagaggttcgagtccccggagccaaattcctctagttggaatctagtaaatgatttaatggcaaaggggcaggggttgggggcagccaaggaggtgaacttttgacagcttcgtggtcagcagcgacgaccgcaggagcgcgtgtccttgaagcggggaagcgccccttttccttgcctgacaataccgccccacacgcgatgacgcctttggaatagaactgcgcagctctttggagacatacggcgcatatagaggctagaaagggaacagagtaccagagggccttcccgcttcgggagccgcaggcttcttctcttcggagagagagtgagtgagtgagtaagcgagtgagtgagtgagtggggagggagtgagtccgtccacgggggcgggccctctccatgctgcggatctcttaggagatatactgcgcacgcagaggcccggaaggaggcggggtcccaggggtctcctcgctagagcagccccaggattggcaggttccagagtgggagtgggggtgtgtgtgtgtgtgtgtgtgtgtgtgtgtcaggttccagagtgggagtgtgtgtgtttgggtgtgtgtgtgtgtgtgtgtgtcagattccagagtgggagtgtgtgtgtgtttggcaggttccagagtgggagtgtgtgtgtgtgtttggcaggttccagagtgggagtgtgtgtgtgtgtttggcaggttccagagtgggagtgtgtgtgtgtgtgtgattggcaggttccagagtgggagtgtgtgtgtgtgtgtgtgtgtgtccccaggattggtcggttccagagtgggagagagagcgagagagagagagaacgagagagagagagagagaacgagagagagtgtgtgcgcgtgtgtgtctgtgcagccccaggattggtcggttccagagtgagagtgtgtgtgtgtgtgtgtgtgtgtgtgtgtccccatggtgggagtgtgtgtgtgtccccatggtgggagtgtgtgtgtgtccatggtgggcgagcgtgtgtgtgtgtccatgatgggcgtgtgtgtgtgtctgcgtgtgtgcccgtgtctgcgtgtgtgcccatgggggcgagggagggagccctaggcgctcaaggctccgccccctcgagccggaggcctcagcgcagcacaaagcccggggcgcactccgctccggggaatccggccccggcggttgcggcggccgcagcgccgccctcgcgctcagccaatgggcgggcgtgctgcaggggcgctggccccgccccccgggtgcgccgggctccgctccccagactggcgctcgggcagtggccgccgccgggcggtcccggccagaggaaagggcgccctgggagggcccctcgtggctgcagaccccgcaggtcgagtctgccacggatggaactttggaaaaagctagggaaaaggagaaaccgagcttgcaagggctcatcaagcatccaccggggtggcttaggctgcgcgcggcgctgggcgtgtgcccgggaggagatcgggtcaccgcgtggcagctcccgggactgccgaggggccccctgaccccaggcctccctcgggaggggtccagaaaggtgcagcggctcactagggtcacacagcaaaattcctcacattgcagggggggagggtccgcatctccgaactcgccgggccagtgcaccctctattctcacccaccactcacccagaaaacgagaaccatactcataaatacattcttaaaatccacaggctacgtttttggggtaacctccagccagtattccgcatgcatttgaaaacttgtgtgtccccattgaatttgcagttccagtaaaccaaggcagcgagtggacattctcatttaacattcacccccataaatacactttttttggggggggggtctcactctgtcgcctcaggctggagtgcagtggtgtgatcatcgcccactgcagcctcaaactcctgggctcaagccatcctcccacctcagcctcccgagtagctgggactacaggcgtgcatcactatgcctggctaattttttctatttttttgtagacatggggactcgttgcccaggctggtttagaactcctggcctcaagtgatcctcttgcctcagtctaccaaagtgttgggattacaggcatgaatacactttaaagtgtgtaatctgtttgcagcacacacggtccaatccatcaatgaggtcatattaactcaattattcaagcaatcatcaccattagaattggagaaaccgaggcatagaggggctactttgccaataaccagctctgccagaactcgaatccaggtctcccagagagaccaggagagggtgtggtatggagtttgggggagtgggagtttgtttgattttttaaatttgtttgtttgtttgaaacagggtcttactctgtggcccaggctggagtgcaatggagccatcatagctcactgcagtctaggactcctgggctcaagtgatccttccgcttcagcctcccaaggagctaggactacaggagagtgccactgcgacagcttttttttttttttttttttttgagagcgggtctctctatgttgcctaggctggtctcaaactcctggcttcaagcaatcctcccactttggctccccaaagcgctgccatcacaggcgtgaggaacccagcctggctgtaacacggcatcacactgtgagttatgtttacctgttccctacctcgacccacccagatctgacaccctcttggcattggaatgcagaaatgaatggagaccctgtccctgccctcccagtatgcacgagacacatacgccccgtgaagggaaagatgtgtctgtcttgcttattacagcatcccagagccatacacacagtaggtgcataataaatcttgtaggaaaaaaaaaatgcaacggaggggcggggattaggtgactgtccctttatcacagcaggagaggaacagtacatgcaaatgtgtgaatcactcgggctatgttcagagaactataaacagttcagagttgatgaagggcaaagtacaggatgagaggaatagaagattagaccagagaggaaagacagggaaccaaggggcttggactttaccccacagcagaagccaaagaaagatgtcaggcagaaagaacaccatcggattcacatttgggggtcatttttctggcttatggtagatggatgaggaagttgagaggcagaggaaacagaaaagaagaggctggcttctgaagccatcggggaggtggaggtgtcaggacttacctgctggatgacgcccaactttccaccttgggcaactggatacaactcacgagagaaacagcaaaccaaaaagacaggtgctcacatgtggacaatctgggtttgaggtgtggagttcaagatatagaggctgcactttggaggctgaggtgggaggattgctggagcctaggagttcaagaccagcctgggcaacagagcaagaccttatctctttaaaaaaataataaataaaaaattaaaaattagctgggcatgatgatacacaagtgtagttccagctaatggggaggctgaggcaggaggattgcttgagcctaggagttcaagaccagcctgggcaacatagcaagacctcatctctatttcttaaaaaaattaaagattaaaaaaaataaaacttagctgggcatgatgacacatgattgtagttccagctacttgggaagctgaggcagaaggattgctcgagtccaggaagttgaggctgcagtgagctaggatcacgccactgcactccagcctgggtaacagagtgagaccttatctcaaaaaaaaaaaaaaaaaaaaaaggctgaagagccacacttccacacaaaaatggttgtgtttgtggttgccgagtcacagctctaaccactccggcttgctccagaaagctactcatggcaaggtgcaaaaacccctgtttgttgggggcattttggaagtttttattctcattcatgtaggcaatacacattttatgcaattaagtacaggagtaactttttacaagttgttgagtttcaacctattgatgtttcctgcattttgagtccatataaattttacaggctatttagaaattactgataataagagagtacagcttatgagagagaatggcatacccattctctggggcaaattcagagcctcaatttctggtaaagagaaacaattaagctaaataaaagtaacacttgaatcagtaaatgaagttatttttaatatttccaaaattgttagtagagctgtctttacaattttttatggatttaaatgacatctgtttttaatcccagcactttgggaggccgaggcgggtgtatcacctgaagtcaggagttcaagaccagcctggccaacagggtgaaatcacttctctactaaaaatacaaaaattagctgggtgtggtggtgggcgcctgtaatcccagctactcgggaggctgaggcaggagaatcgcttgaaccctggaggcagaggttacagtgagctgagattgtaccactgcactccagcctgggcgaccaagtgagactctgtctcaatcaatcaatcaataataaataaattacatctattttcattctttttttttttttgagttggagtctcactctgtcgcccaggctggagtgcagtggcgcgatctcggctcacggcaagctccccctcccgggttcacgccattcccctgcctcagcctcccaagtagctgggactacaggcgcggccaccacgcctagctaattttttgtatttttagtagagacggggtttcaccgtgttaaccaggatggtttcgatctcctgacctcgtgatccacccgcctcggcctcccaaagtgttgggattacaggcgtgagccaccgcgctaggccttcattcttaattttatctacaatatttgttctctccccctcctttgtcttagtttttctgttttattgattcctccctctaaaacagcactgtccaacaaacgttcagcagctatggaaaagttctgtatctgttctatccatttcagtagtcactaaccatacatggcccctaagcagtggaaacttggctcgtgcgactgagaaaatgaatttttaatttaattttcacgtgggttgtggccaccctactgagcagcatctctctaaaagatccagctttttgattttgtcagttctatttgttttctaatcagttcgtctgtgcttattatttccaatattcatcatctcatttttgtgatttctctctatattcatataataaattatcaagcaaatttcctctataatcatttaaacctctgcctttgtctccatgttcacatcattgtcatcttcaaatagtctatccttgcagtgtttcgatcctccaacttaagacttaggggttggttgtttttttgttttgttttgtgttttttgtttttttgagatggaggttagctcttgttgcccaggctagaagagtccaatggcaccatctcggctcactgcaacctctgcccccggggttcaagcggttctcctgcctcagcctcccaagtagctaggattacagggtatgcgccaccaccctcagctaatttttgtacttttagtagagacggggtttcaccatgttggccaggctggtctcgaactcctgacctcaggtgatccgctcgcctcggcctcccaaagtgctgggattacaggcgtgagccatggtgcccagcccttttcggtttttttgtttttgtttttttggttttcattttctttttaattatcaagtggtaggagtctctcttacatgcttgttcagttaagcttttaaaaattaattccagttatgcttacttgcagccagagattagaacccgtacaatgtctgcttttttggaatgtattggtttggggtggggttttgttgttttttttttttttttttcagatttaacagatgattgatttttctaactattccaagagcactttaaaatgtatattgtttgcagagtgcaaagttcagtcctatctgttaccacaatcttattaaccatgttattcaaactttttgttacctgagtctcatctcccagatccaggctgtgttggagtcttctccgaagtttctccttgcatttccaacaatttgctctctacagtttaattctattctaggtgaccctcaactcattaaagatcatcccttcaaaccatgcaaaagctctccctctctccctgaaaacgcctcgcgccttgaattctttgcttatttttctctgttcaaatttagccacacgttgaagttttctgtgtcatttttggaaataggtatgacaatctgtaagcggcacagagagagagaaccgcagcctccatgggaacgaggaagtgggaacgggatgagagtttggaatcgatctccgtggaaggtctgaattgcaaggcgggtttccctggggacaatctcaaccataaaaaagttctgctcacatgactgatggcttttcaataacaagtatatggcggtcttgaatgtgcacaggttgacagttttcccgggagcttctacatgcacgagctggcagagtctagggacagggacaaggaatggagaaaatttcctcaactcctgaaggacacaggtgcccatggggacgtactgaatttctgcagaggcaccgtgaaacagaatcataagtcagaaggaaaatgcacctatttcacattccatcgtgacaaaagggagacgacttttagcttacctcctgattctgcgggttcctaaaagccaggatgactgctttaacttttatattttattttatttcagatggagtttcactcttgtcacccaggctggagtgcagtggtgtgatcttggctcactgcaatctctgcctcccaggttcaaggaattctcctgcctcagcctcctgagtagctgggattacaggctcccggctcactgcaatctctgcctcccgggttcaagcaattctcctgcctcagcctcctgagtagctgggattacaggctcccggctcactgcaatctctgcctcccgggttcaagcaattctcctgcctcagcctcctgagtagctgggattacaggtgcccagcaccatgcccaactaatttttttttttaattttttatttttagtagagttggggtttcaccatgttggccaggctggtctcgaactcctgacctcaggtgatccacctgcctcggcctcccaaagtgctgggattacagacgtgagccaccatgcccagcctggaatgactgctttattttcccctctataagttacgagagtcttcgtgtgtcatctccatgccaggagcctcatggcctcgttttcccggggggccactccccgtgtatatacctcagacactgctattctattagaaaaacatgtgaagttctctgattgggggaaagatccatttcctgctcatgttgatttcaacaaaagaaaggaataagtttccctctggatcctcagacttcactggctaatcaagacccaccttgcagctgctctttgtccaccagagcaaacagcccagatacctggaacttcccagttctacctggatttatgctactgagccctggcacctatgcggggaaaatgcaataaggaaaaaaaggacaaacaatgctcccctatcaggctggctgctgaacatcatcatgtaagaaagatgggtagagccgggcgcagtggctcacgcctgtaatcccagcactttgggaggccgaggcgggcagagcacttgaggtcaggaactcgagaccagcctggccaacatggcaaaacctcatttctactaaatatacaaaaaaaattagccgggcatggtggcgggtgcctgtcatcccagctgcttgggaggctgaggcaggagaatcgcttgaagccaggaggcagaggttgcggtgagccgagaaggcaccactgcactccagcttgggcaacaaaagtgaaacttcatctcaaaaaaagtttactaggcagcaaaacacctcctgttgcttgtcccattctctagtggcttctatcaacagatctgagctcctacggagtgtccggcaccatctgagctccagatacaagctaatggttagaacagacctttccacagcctagagggtagacagagagaaatctttagcactgggcatgcaagcacatttcgttacaaattgtgaccatgctccaatcaagttcacagggggctgaaacgcccgggttgttaatttcctcagaaggttattctataaaagccaaagtgttactttcttgcattgagaaaccagagcaccaaatgccaactttctagctcagttctcaccttccttcctcatgtctgccatgcaatcaaactaaggaacggatggacagccagccatgcctgtcagtcccgcagtagccaggcctaagatggggacagtaggaggagcgtggagaaattctacattgtccaaatctgctctcttggcttcctgcagtggctctctcatgcctgtaatcccgatactttgggaggctgaagctggaggatcacctgaggtcaggagttcaagaccagcctgggcaacatggcaagacccctcacaccccccacgcccatctctacagataatacaaaaattaggtgggcattgtggtgcacacctgtagtcccagctattcgggaggctgaggtgggaggatcaattagcccaggaggtcaaagctgcagtgggttatgactgcatgacagcactccagcctgggtgacagagtgagacactgtctgaggctctcccatcagacctgcgagccacagcttcaatagccagcacgtggagtgcaaggacttatggtatcaggtcgacctgagtttcgagcagacacagctacttcctggtcacatgagtctgctttctgtgcctcggtttccccatgtgcagacgggaaccatcgaagtaccttgggctgacttgaatactggaggggatgacgcacaaaatagcactcacaacttcctttatttcatgggaagagagggttggatggattaaaccaggggtcccccacccctcagggagttgagagacagaatctcattctgtaacccaggctggagtgcagtgggtgtgatcatagctcactgcagcttctacctcttgggctcactcaatcttcccacctcagcctcccaagtagctgggactacaggcacacacttgtgatccacactcagctaattttggtattttttgagcagacggggtttggccatgttgcccagtctagtttcaaaccagccagttaggaaccaggctgcacagcagtggacgaggggcgggcgagcgatggaagcttcatctgtatttacagtcactcctcattgcttgcatgaccatctgagctgcgcctcctgtcagatcagcagcagcattagattctcctaggagcgtgaaccctattgtgaactgtgcatgcgagggatctgggttgcacgctctttatgagaatctaatgcttgatgatctgtcactgtctcccgtcaccaccaaatgggactgtctatttgcaagaacccaggaggaggaggtttcagtgaacagagattgcaccagtgcagtccagcctgggtggcagagtgagaccctgtctcaacaacaacgaccacaacaaaaacaaacaaaaaaagagtcatcaaggaataaataaaacgggtgacacgctgtttttctaaagcccaaatatcacgttgtcaaccacacttcctgatgacatctaaatcccctttgaaactgcttggaagtttctagaagagctcatccacagtaacagaacactcaagtctaaaagggaaaacacaaaatccccaattttcctctcagaaatcaagatttaatagcctcctaaggaaaccataatttgagggccattgggagcattactctctgaggcctgtgattatagaatgccgagaatgattgggaacttgaaccaccagtgaatttgggctccaactaaaatgaatgagacccgtggccaggcacggtggttcacgcctgtaaccccagcactttgggaggctgaggcaagcagatcacctgaggtcgggagttcgagaccagcctggccaacatggtgaaaccttgtctctgctaaaaatagaaaaattagccaggcatggtggcatgcacctgtaatccccagctgctcgggaggctgaggcaggagaatcgcttgaacccgggaggcagaggttgcagtgagccaagatggtgccactgcactccagcctgggcaacagagtgagactccatctcaaaacaaaacaaaacaaaacaaaataaaaaattaaaatgaatgagacccaaagcagaaggtataccaaagccccctcacccacacacagacactaagaggaggctggggagggctcaaggaagttggaaagagggaaaatatcacgagaataaagcaaccatctcaaaaaacaacatgagtttccccacttatgtctccctagcctggctaaagaaaggagaatgggccgggccagtggctcacacctgtaatcccagcactttgggaggctgaggcaggaggatcgcttaagaccagaagttcgagacaagcctgggcaatatagcaagacccatctctacaaacaagtttaaaaactacttgagggcctgaggcaggaggatcacttgagcacaggggtttgaggctgcaatgagctatgactgtgccgttgcactctagcctgggtgatagagtgagaccttgtttgagaaggaaggaaggaaaggaaggaaggaaggaaggaaggaaggaaggaaggaagggaaggagggagggagggagggagggaggcaaagaaagaaaagagttacaaggagcttggccttgggcatggaaagggatttgtggttaagagctggcccctcttccagcccttgtaccccccagaaaaccacctcgtgtttggctcacgaacttctgcttcttggaactcatctaagtcaaagacaacaacaccctctgagatgctactgacctcatgccacgtaactattctgtggctgccaggaggaaccgcccactcgctcttcttgggtttactcctaattccacgcccacctcaccttgaacttcccactttgaaatctaaagatcaaaggtgtttcttggttctcacatagaaatcccccccttgaacttccttcctatctgtttcctcagcctatcttccctctggccgtgtattattcacaaagagttctacaggatacaaagataaaatttaatgtactttccttagcaaccggaaaaaaaaaatccctgaaaaattaaacagcagatacccaaatagaaactttgctttagaaaaatgggatttgaccacacacacgtgcacaggccacacaaaccgtcataaccttgaccagcttaagagaacaattctcaagccagtgagaaaacaacagctgtggccgggcgcagtggctcacacctgtaatcccagcactttgggaggcccaggcgggtggatcgcttgagcccaggagctcgagaccagcttagataacatggcaaaaccctgtctcggctaggggtacaaaaattaggctgggcgcagtggctcacgcctgtaatcccagcactttgggaggccgaagtgggcggatcacgaggtcaggaaatcgagaccatcctggccaacatgcgaaaccccctctctactaaaaatacaaaaattagctgggcatggtggcgcgtgcctgtaatcccagctactcgagaggcagaagcaggagaatcgcttgaacaggggagttggaagttgcagtgagccaagatggcgccactgcattccagcctggcaacagagcaagactccattaaaaaaaaaaattagctgggcatagtggcacatgcctgtgatcccagctactcaggaggctgaggcatgggaactgcttgaacccaggaggcagaggttgcagtgagccaagattgtgccactgcattccagcctgggcgacagagcaagattccatctctaaataaataaataaaattagctgggcatagtggcacacacctgtggtcccagctactcaggaagctgaagcaggaggattgcttgtgcccagaaggtcaaggctgcagtgagctgtgatcacaccactgcactccaggctgggtgaccaatgcatcgctctcacctctctccaggcagcctgcagaagccagatatttatttgaaacctccagcttctgctcctcatgtgtatgcaaacgttgagctcaactccataaaagtcatgttttgttttgttttttgttttgagacagggtctttctctgtcacccaggctgcctatcacagctctctgcagcctcgacttcccaggcttaactgatcctcctgcctcagcctctcgagtaactgggattataggcacacaccaccatgcccagctaattttttttttttagagaaggggtcttgctatgctgcccaggctggtctcgaactcctggattcaagcgatcctcccgtctcagcctcccaaagtgctgggattacaggtgtgagccatgacgcctggccaaagtcatgtattttattccataatagatgtacatgagggtaaaaataacacttgactaatgtacaggttgaaatacagaacatttgcaccacccccatctttgaatactatttcatccaccctactccaattccaagagcaatgtcgtgggtgtcttagcaatcaaggatagcacctccagaacaaaaacgctgtgaaagtcaaagagaagttctgtttatactaacaaagggctggaaatgtctattggttgtgggttgaataagtaaattccaaatgaacgtgaccacagaagaaacagagattcaaaatgacccccaagaagtattactaagggagaacgccaagagccaggcgcagtggctcacacccgtaatctcagcactttaggaggccgaggcgggtggatcacctgaggtcaggagtttgagaccagcctgatcaacatgggaaaaccccatctctactaaaaatacaaaaattagtcaggtgtggtggtgtgtgactgtaatcccagttgctcgggaagctgaggcaggagaatcgcttgaacccaggaggtggaggttgcagtgagccgagattgagccattgcactgcagcctggtcaacagagactctgtctcaaaaaaaaaaaaaaaaaagtaaacaagagtgtctcctctccataaacaaattaacaggagaaactcagccccactaaaacacacacaaatttaggaaattgacaaaaacctaagagctgagaaaatatgggttctggagtctcagtgtttggcatcaagtcatggctccactttctcctcgctgtgcgactcctggaggggaacctagtgtgcctggtcctcagtttccctgtctgtagaatgggctgggaaaaactatgcagattcttggaaccagggtgacacaagcaaggcactggcctctggcataaaagttaaggcgtgccaaaaccgtcttcaagataagttatatatataaatatatatgtatatatggagagagagagacagagacagagagacagagagagacagagtcttactctgtggcccaggctggagtgcagtggtacagtctcagctcactgcagcctctgcctcgcggtttcaagcaattctcctgcctctgcctcccaagtagctgggattacagccacccaccaccatgcccagctaattattatatttttagtagagacagggtttcaccatgttggcgaggctggtctctaactcctgacctcaagtgatccgtcctcccaaagtactgggattacaggtgttgatcaaactgttcttgatacaatcaggtaattccagaaaaattgtccccttggggcctgcttgttagttggctggtttgtttgaaagaggatctcgctcagctgcatgggctggagtgcagtagcaagtcacagctcactgcagcctcgacttcctgggcttaagcgattctcccacctcagcctcccatgtagctgcgactacaggtgcatgtcaccatgcccagctaatttttatatttgtagtagaaataggctctttctgtattgcccaggctggttttgaactcctggcctcgagaattcctcccaccttggcctctctaagcaccaagatgacaggtgcgagggaggcactgcgctgtcttatttagcaataagctacattccattttcaggaggtgacgctgtcatcccactgccagtacaatccaggtaaggatttcactccatcctctgtgttttccaaaggagccggtatttgaaaaggacgtgcattccaccaagcattcttaacgacctgggcctttggggtcaggtaagttccagattttattattagtaacaaattaaattgactaacaacaaaagaaaagtgcaccatcaatgacccctcaggaaccaaaacatgcacaatcccattgacacagggacagagtaaactgctcaacagctgactctactcccacagactgaaagctgcagggtcagggccggcagccgcggagaaggaagctgtccccgtcaacacggtctggaacaatccacaacgcttatcaggggagataccacaggcaagagggaacgaaaacacttcttctgccaaatagagctttggagggaatatcggtttgtctggggcaggactgggtcacgggctacacgccttctccttgtattctcacgaattcaacacctggtaatgccggggccgtttcccaagtcacagactcagactctggggtggataattcccccatcactgttatcttaaagtagggtttctcagcctcaggactggtggtattcagagtcggatcttcatctggggaggggccgtcttgtacattgcagggtgctgagcagtatccctggcctccacccactccatgtcaggagcatctccccccaccccgacgtgtgacaaccacagatgtccccagaaatatccagacccaccctagggtgagaaccacttggtgagcgagactcttgccagagccagagggaaatcatcaaagccgatggggctgaaatggttaagttggtccatctgtctgtctgttcatcaggccctgatttatagctttgggggctccagcaccccattcccctggcttccccacagtcacactgccattccccatcatccccgggacccaagccctgcgattcccgctcagctcccacctagcagacacatgttgaatcgaatgcccattcatctgtccaagatttgctgagggtctgccatgttttggaggcgcttcaatagcgacaagacatcgtggaccttgacctcatggtgcttccagtctagcaggcaggcaggcagaatcagagagaaaatttttctttaaatttatttttgggtttttttgagatggagtttcactcttgttgcccaggctggagtgcaatggcatgatctcggctcactgcaagctctacctcccgggttcaagcgattctcctgcctcagcctcccaagtagttgggactacaggcacccacccccacgtcctgctaattttttgtatttttagtaaagacggggcttcaccatgttggccaggctggtctcgaactcctgacctcaggtgatccaccaacctcagcctcccaaagtgctgggattacaggtgtgagctactgtgtccagccagagagaaagttccatctgcttctgtaccaccctctagcagccctctccagccccgccccctcagtgaattcctacagcacacaaggatcccaggccagcaattagagtcctttttcagctctgtttaaaatgtgaggcttagaataacagtgaagatgctttaaaccactacagggggccgggcgcggtggctcacgcctgtaatcccagcactttgggaggccgaagtgggcggatcacgaggtcaggagatcgagaccatcctggctaacacggtgaaaccctgtctctactaaaaatacaaaaattagctgggcgtggtggagcacgtctgtagtcccagctacttggcaggctgaggcaggagaatcgcttgaacccgggaggcggaggttgcagtgagccaagatcgcaccattgcactccagcctgggctacagagcgactccatctcaaaaaaaaaaaaaaaaaacaaacaaaaaaccctacagggcactgcaggaacccaccctccataaagtatgcaaagaattattatgcagcattcacttcccctttgcttctctcccccaaggaatgctcaagataaattctctcttgcaggtcctttatttatcaagccaaacagcatctcagagggataatttatgcaacaaaggttgcaaatcatttgcacatcttcaaagtattattgtccatagcccagtgcatgagcgcctctaattgtctacaaagaaaagcaacaccttcaacaactcacgtccagcagagaaagacttcagacaggaaaagtcaaatcacaagttaaaaagtcagaactggctgggcacagtggctcacgcctgtcatcccagccctttgggaggctgaggctggtgagtcacgaagtcaggagttcgagaccagcctgaccaacatggtgaaaccccatctctagtaaagatacaaaaaattagccaggcgtggtggtgcacgcctgcaatctcagctacgcgggagggctgaggcaggagaatcgcttgaacccgggaggcagaggtttcagtgagcagagattgtgccattgcactccaggctaggtgacagggcaagactttgtctcaaaaaaaaaaaggaaatgggatacagacactttaacttcccaaaacccagacaggttggctgttagcaacctgggcgagaagtctatgaaccagcttcacaataaatgccttttaaggatggctatgtgatgaaggtgttttctctttgtgattaaacgccttactcatctgaagggggaaattccatttaagaagtgaaccaggtatgagaagagacattttccccagagggaggcaatgacctctttcctccctggggctcggaacttgtttcttcacacgtcctcccagaactctagttcttattcccccctgtgctggccctccataaacatttgctgaacaaataaacccatgatggaaggcaagagaaacttcaagacaagacggctaggccgccgactgcctaactggagggaaccagatgttagcattaaagttaaaagttaaaagccttcccaaggtcaccaagcgaggtctctctaacctggcctgaggtcctcattcttctctaccctgtttacccaggatggaaaaatgacattctctgctggtgggctggttgtccacgtgagagatttcaacacagcgtttggaggttttaaacctctatcatcgctgcagcccaaggaacaaaatcaggggccaggtatgcattaggggatttgcaaatgctgtcttatttcatccactcaatgaccatagaggaagatatgatgatgacttatccctctttttatagatgaggaaacagagatgttcagtagttccaaagttccttcccttccctttttttcttccctccctccctcctccctcccctccctccctttccttccttccctccctccttccttccttcttccctccgtccccacctccttccttccttccttgttccctcccttttttttccttccttccttcccctctccctccctcctttcttccttccttcttccctgtcttcccagcttctttctttcttcagggtctgcttctgttgcccaggctggagtgcagtggtgcaatcatagctcactacagcctcgacccctgggctcaatggatcttcctgcctcagcctcccgagtagctggggctacaggcacacgccactgtgcctggctaaatttttattttttgtagacaaaggtcatacagcaaagaagtggaagaactaggattcgaacccaggaccatgggctctgagtctgtgcttgttcatggaagcaccagccagttcagacactcccaggccttgcccagatggtcaaatgcttcaaacaaggacaccagggaaggtcactgttcctcgtatttatgccccttgtgtcactgtctatatctggggttaagaatcactccaaaaacaccacaatgatctcccagactctcaattccagcagagcagacagccgtccccaccaccaccccctccacccactcagtcctctctcggttccacttcaggatgactcgaaagacagaaaaagactcaaagcaaaatgcctaaagcttggaaacgccagcagcccctgaaaactaccgagcttccttttcctgtatttatttatttatttatttatttttttgagatggagtcttgctctgtcacccaggctggagtgcagtggcatgatcttggctcactgcaaccttcgcctcccgggttcaagtgattctcctgcctcagtctcccgagtagcttgaattacaggcgcatgccaccacgcctggctaatttttgtaatttttagtagagacagggttttaccatgttggcctggctggtctcaaactcctgacctcaggtgatccactcaccttggcctcccaaagtgctgggattacaggcgtgagccaccacacccaaccctgagtctccttttctgataacatccttcatttctgcttccttctgcttccttctctgaacatattcgaatcacaaagccccagctctgttgggaaattccgacgggaattgaaacaggttcctaatctcatggtctcacctgagggaaaagtggctaagaagatggaagcaggctgggcacggtggctcacgcctataatcccagcactttgggaggccaaggtgagtggaccacctgaggtcaggagttctagatcagcctgaccaacatggtgaaaccccgtctctactaaaagtacaaaaaattagccaggtgtggtggcgtgcacctgtaatcccagctacttgggaggctgagtcaagagaattgcttaaacccaggaggcagaggttgcagtgagctgagatcgtgccattgcactccagcctgggcaagagagcaagactctgtctcaaagacaaaaagaagatggatgtaactgactgtgcctctgaaatcctaaacagaatattacatggcgtcttggacctccgtgatgttatgcggtacaaatgagacggcccctgaactcccactgtgtaccaggagttggggagaggtgcatagtagcaggacagacatccagagggtaacagggaaccacgggggatgtccccgggctctgggttcgaaaatgcaggccccttgtatccagggggtctgggaaggaacaaattgccacggtgtaatggagccactgcaggtgtccccagaagccacagcaaggccatcaggatgctggggccccgtatccacctctcaccaaggccctgctctgactcctgttggcccctggctagagacccgcccagagggggtttccaggcccaggtgctgggtttctcaccgtatccatttcccattgctgctgtcacaaacgcccacaaatgtaaaacgacatacatttattattttctcctgcatcgggatcttactctgttgcctaggctggagtgcaatggtgcaatcatggctcactgcagcctcgaactcctgggctcaagcaatcctcccacctcaacctcccaagtagctgggaatatagatgtgtgccaccaagcccagctaatttttcttcttcttcttcttcttttttttttttttgtagagatggggtcttgctatgttgcccacactggtctcaaactcctagcctcaagaaatcgtcccaccttggcctcccaaagtactggcattacaggcatgaaccatcatggcctgcctattttcttacagttttggtggtgaaaagcccaaaatgagtcttacagggctaaaatcaagatgttacaaaggttggttccttctggaggctccagagagaatccagcttttaaggcagctcctttttcttggccgtagcatttcaatctcttgcctccctctttccttgaaaaggatccctgcgatggcatttggtgcaccagataatctaggatcatccccccgtctcaagatcctcaacttaatcacatctgcaaagagccttgtgccaagtgaggtaccaaattcacaggtgacagggattacgatgtgggcatctctgggggaagggagaggcatcattcaaccgaccacattcaccctttctggtattttcctctcccagccacagaatgtttcggtagcagtcatcgagtgatatcttttttctttttttcttttttgagacggagtctcgctctgtctgccaggctggagtgcagtgggcacgatcttggctcaccgcaagctccgcctcccaggttcatgccattctcctgcctcagcctcccaagtaggtgggactacaggagcccgccaccacacctggctaattttttgtatttttagtagagacggggtttcaccgtgttagccaggatggtctcgatctcctgacctcgtgatccacccgccttggcctcccaaagtgctgggattacaggcgtaagccaccgcacccggccttcttttttttcttttgtaaaaacaaaacagaaaagatgcaagggtgacacagaaagttctcatgtacccatcactcagtaaagagataaattccccaggaatggaacagaatgtggcacccaagaatctgctgctcaggagagtccccagagctgtctccactgtgggaggatgggatggtgacggagatagaagagtccctgccttgtggcgggggaagagagattgcaaaacggtgagcaaagaaataaacacgttccacctccataggaaaacacagggggaaggggagaaattctgaccccccgggggtcacgtggaagtgtcttggagacatttctggttgttgcaaccagtgtggggtgggagtgctactggtatctagtggggggaggccagggatgctagtaaacaccctaaaatgcccaggacagctgccaccagagagataatccagctccaaatgtcctcagtactgtggttgaataggcagggagtgaggaaatttcatctaagagaaatcaaatcagttgcctaatgtcaccctgctcaaaaggggcagacctggggttaacaaccatgggtttttctcagagattctgcacactgaacttcttgcctcttgttttttgttttgttggttttttctgtttgtttgttttgttgtttttttctgtttgtttgtttctttgtttttatgaaacgaagtctcgctctgttgcccaggctggagtgcagtggcatgatctcggctcactgcaacctctgcctcctgggtttaagtgattctcctgcctcagccacccaagtccctgggatcagaggcacccgctgccacatctggttaattttttgtatattttttgtacagatggggtttcgccatgttggccaggctggtctccaactcctgaccccaggtgatccacctgccttggcctcccaaagtgctgagattacaggtgtgagattaaggcccagcccttgcctgttgtttgagcaaagataatctgaggaaatcgtatgaggaagtatcacagggaaaagcatgtaggtagagggaacagcaagtgccgaggcttacaggtggcaggaaggcagccagtgagctccagccaagggtcccatgtcagagaagtaggtaactgacttgttggtggcagcaaagaagaaggcatgaaccattcgctcttctgtgcagcagtcactctgtgtgtggttttcagacatatttaaagtggatttaaaaaacaaacaaacaaaaaggacttgcaatccaacatctgagtaggggctttattaggcttcccaggacctggggaaattacccaggattcaggataaaactgcaggggtgtctgttgcagggaccagatatattactctctcctgaccacaacctttccaacctccacactggcctctgaagctccgggctccagttactttcactgaccacccccggggctggaagccatggaggggagctctgcagctctttgggcttcacatgttgctctgattgtcatgccttggattagcaagacctctttcagtttgtgagaatagaaagctcagttatacagagagaaagaagagagagagagagagaaaagggagggagggaaggaaggaaggagggagggagggaacgaaggaaagaaggaaggaaggaagggagggagggagggaagggggagagagaaggaaggaaggaagggagggaagagagagagaaggaaggaagggagggagggaaggagggagggaaaggaaaagaaaggaaaggaaggagggaaggagggaaggaagggaaagaaagaaaatgaaaaaaaagaaaagaacgattgctggctcatttaactaacaagtcataggacaaggacactttcaggtacagctagatccaggtgtcaaatgatgtcatggggaccccatctctctccctttccttttcgcagtcctgcttccttctatggtgtcagaagtctgagacacgtggtctctacatggtggcacctggattatagcttcacagcaaggaagatttagcaaggaaaaatctctctatcactcccactaaagtcccagaactgaatcttatggaaccttctggggtcacatgcccacccctgaaccaatcatggaggctggaggaattaagaaagctgattggcccagtctgagtcatgtgccttcccctgagccaatcataagagtctgaaggaataaaggaagctggctctgggaatagagtccacacaatgaggtctgagtggcttcccaagcaaaatatgattctaacccatgcaaaatctggttctatctccaggaatgctgagtaggcaaatctgaatgcctcctctccagagatgagtaatcttgtgtttgcctccttttcaagttggtggcaaaagtgaatcctatttttttgttttattttatttttgagatggagtctcgctctgtcgcccagcctggagtgcagtggtgcgatcttggctcactgcaacctccgcctcccgggttcaaacgagtctcctgcctcagtttcccgaggagctggggctacaggcgcgccaccacgcctggctaatttttgtattttaagtagagacggggtttcgccatgttggccaggctggtctcgaactcctgacctcaggtgatcctcccgccttggcctcctaaagtgctggaattacaagtgtgagccactgtgcccggccacggatcctatttttacaacttgtgccaactctaggtaggttcggtcttgttatgcccattcgaaaaactgggactaacagagcatatgttatgcagtgaccaagaaaattaaataaaataatagatataaaacacttagcacagggtctagtatttggtaagtctgccacacatcggcaattattattcctatattttaaattttactggtaacataatagtatgatttgaatatttgtcccctccaaaactcatgttgaaatgtaattcctcatgtggcagcattgagaggtggggcctttcagaggtgattaaaagggctgtgtcctcataagtggattaatccattcatggattaatggtttatcataggagtgggactggtggttttataagaagaggaagagagacctgagctgacactctcagctccctcgccatgtgatgccctgctccctgtcaggactctgcagagtccccaccggcaagaaggtcttcaccaggccgagcgcagtggctcacgcctgtaatcccagcactttgggaggctgaggcgggcggatcacttgaggtgaggagtttgagactaacctggccaacgtggcgagaccccgtttctaccaaaaacacaaaaattaaccggctgtggtgttgcgcacctgtaatcccagctactcgggaggctgaagtgggagaatctcttgaacccaggaggcagaggttgcagtgagctgagattgtgccactgcactcgagcctgggcaatagagtgagactctgtcaaaaaaaaggaggaggaggaggaggaggaggaggaaagaagaagaagaagaagaaggctgggcgcagtggccacgcctgtaatcccagcactttgggaggccgaggcgggcggatcacctgaggtcaggagttcgagaccagcctggccagcacggcgaaaccccgtccctactaaaaacacaaaaatgagccggttgtggtggcacacgtctgtaatcccagctacttgggacgctgaggcaggagaatcgcttgaacctgagaggcggaggttgcagtgagccgagatcacaccactgcactccagcctgggctacagagtgagattccatctcagaaaaaaaaaaaaagagatccctcctttcaggataaagtttgcatggactctggcatcacactgggtttcaacttttcctttctagctatgtccccttctctaggcaattcagctactccaggccccccgtccacttaccaggacacaggaatcagagtaacacccatctggcagggctgttgtcgggatcaagtacaattatacagcaggcttggggttctgaagcagctgggaagatccacaagccacgatatattgagcaccaactgtttacagctatcaagcatgtactatccaccaggcacatgatcctcctagcaattttttcatttttctgcacagcaccatttgggaaaggctaagtcagagtctggggtgggttgaaagctagaagacactctgagcctatgtcctcggtaaaaaaaaaaaaaaaaaaaatcaggagtgacccatgctcagctgatagcattaacggggaaggaaagagggcgacagagactcttccccaacatctatctagcccagcttggcactttggaccgcagcctgtatggaaattcctggcctctgatgacctcaagctgtcttggtctttaatcctgactctgaacctgtttccttactcagatagaggtctgacttttgacatgtgtcccgtacacccagcacccatctggcttccttatttttttgtttttttaagagacagggtcttgctctgttgtcctggctggtgttcagtggtgtgaccgtagctcactgcagcatcaaactcctgcggtcaagcaatcctcctgcttcagcctctggagtagctgggactacagccatgggccaccacagctggctaatttttttatttgtttagagacagggtcttgctacattgcccaggttggtcttgaatccctggcctcaagtgatcctcccacctcggcctcccaaagtgctgggattacaggcatgagccacggtgtccagcctggcttccctatttggcagtgattatgtccactccttgctcttggtggaggaaacagctgtgtccttggggagggccaggctgtaggtaactacgcttccttagaggaagctataggtataaggaagtttgcttactccagggacagggaggccagctcccttgcaaaaaaggcaaagagggaggccagtgaaaaactggctaaaactgtctgggcactgtggctcatgcctgtaatgccagcactttgggagactaaggagggcggatcacctgaggtcaggagtttgagaccagcctggccagcatggcaaaacaccatctctactaacaatacaaaaattagcccagtgtggtggcgtgcacctgtaatcccagctactcgggaggctgaggcaggagaattgcttgaacctgggaggcagaggttgcagtgagctgagactgcgccactgcactccagcgtgggtgacagagtgagactctgtctcaaagacaaacaaacaaaaaaaaccaactggctaaaactaaagaggttaccatgtgccactcactacactttacatgtcacaagcattaattacctcatttgattttcacccaaaccaagaaatggaagtatctagagaaagaagcccagcataaagacacaagggagcatttttggaggtaaccattgacagaaatgagttaaagaaaattcaactggtgtccaggctctggtgtaaaattctgctttggggtgaaacgcagggttacctgggcacactgtgatggtcctggctaaccagtagcaggtgggcttttgcagagataatccagggccctgtgatgagttggtcaccctagtgacccaattttggcctccagatattggcttctggccaattctaggaggatcaggaagccaaatttagcacagaatgtgctgcttcttcattgaactcctattcacccttcaaaacccagtacaaaagttcccttcctctgtaaggcagagtatagcaagaaaagctagggttctgaagccagagagactgtgggttcaaatcctagctctgtgaaaagattgttgtgaggaccatgtgcctgggagacaatacatgctcaataactctatacagctggtgctcagtagtgacttatggatattcccaggtgcttcaaagccctcaacctgatggatattactctattaaacccaaaatttcccatcttccctcctctaagccaccagaatagactggaacaaaaaaaaattttttttttttttgagaccagtctcgctctgccacccaggctggagtgcagtggcatgatctcggctcactgcaacctctccctcttgggttcaagccgttctcccacctcagcctccagtagctgggactacaggcgtacaccaccacacccagctaatttttgtatttttagtagagacggggtttcaccacgttggccaggatggtctcgatctcttgacctcgtgatccgcctgcctcagcctcccaaagtgctgggattacaggagtgagctaccacaccaggccaatttttttttttttttttttaaagacaaagtcttgtgacatgctcaaaccagctcatgcaaatctccgtttcagtctttctccctcaacctcaagccctgacaccaagcagggctgttttccaattggcttttcctctgccaagaatttccccagagcacaaacagaggcgtgcagcgaagtaaacacgggaagctctgaaaacccattcatgggcaactcaaaggtgtcgagacatcagggtgtgtggccgagctttccgccatgggggcagcgagcctccacgaagcccaggcgacttgccgacggccccactccaggtgaccaagccacatctcgaccagaggaaggagaacatacaaagaaagacactgtctctgccggagggcgatggtccaggcagtgcaccctgggcgaaggggccaagaagccgtaagatgtgcgtcccgaggaaatgcaccgtggttataaatacagcaaagagtgtttggatgaagctggtgtctgaaagtggagacagtcctggctaaccaatagcaggtgggcttttgcagagataatccagggcccttttcacagagacctagggctgtaaggaagtcccccaaacgcccaataaatatccaggttcttgtctctaaattagctggctgaagaaaacttggtccaaactgcatcagaggtgggggtgggggaacagaggaaagaaaaggggatgagagagagacagacagacagacagacagacagagacagagaggggagtatcccattaaggcagcagggcagcagcaaagaggagagaggaggggagaggggaggttgtggccacatgctgtgtaacacttagagtttcctatgcacccagcactattccaattattaaccatttatttcccccaacaatcctagatgttcccattttacagaggagaagactgaggcacagagaggttcagtaacctgcccatggtcacacagctattgagcggccgagccacaagaagacacttgctccatcaatgttactgtgggccagttgccgttataggtgtaagatgattcctcagggagaaacgctaatgttccccttccccgacactttctccagatcagcttaggggtgcttgagtgcctgacccgccacccccgccccaccaccaagccaaaatgcttgagtgacactctctgattctccagtgtaccatgtcaccaattaggtgtttcaagaggggcttccaagagggaaggacctttctgttttcttccctgtggctatgtcctgactccccagcccagcacttgagtaatacataaacccaccttcattaaatgactatcatcatattcctccagattccttggtcccccaagtctagggacgtggtttttgtcggtagcatggcagtgtcaaaccacagagccacgaggctgatgatgggctcttggtttccatttcccccccctcaaaaaaagagcagagaataattgcagagtgcccctcacccccattccagcaccctggtccaggggtcctcaaatggaggcgattctgcccaccaggagacacctggcagtgtctggagacatttgtgtttgccatgcctcgggggcggcgctccaggcatggaatgggtggaagccagggatgctgctagcaccctcagtgcccaggacggccccaccccagagaacaatccagccccagtatccgcaggccccaggtggagaaaccccgtcccggaatgagaagcccctctcctccaccacatcaaagccaagatgacaacgtctctgagtttgacacaaggttagggggaagtctcatttttcaaatggctggctgtaacactaaaaaaggaaaattaaaaatgtctgaggatcggcctagtgtggtgcctcacgcctgtaatcccagcactttgggaggccgaggtgggaggatcacgaggtcaagagatcgagaccatcctggccaacatggtgaaaccacatctctactaaaaatacaaaaaaaaattagctgggcatggtggcgtgtgcctgtagtcccagctactcaggaggctgaggcaggagaatggtttgaacctaggaggtggaggttgcagtgagccaagatcgcaccactgcactccagcctggcaacagagtgagactccgtctcaagggaaaaaaaaaaaaaaaaaaaacaactctaagtaccaactgcagtggctcctgcctgtaatcccagcaatttgggaggccgaggcaggagagttgcttgagcctgagaggtcaagaccatccctggcaacatagtgagaccccatctctacaaaaaatatataaaaattagccaggtgcgatggtgtacacctgtggtcccagctactcgggaagctgaagtgggaggattgcttgagcccaagaggtcaaggctacagtaagccatgatcacgccactgcacaccagcctgggcaacagagccagaccctgtttccaaaaaaaaaaaaaaaatgcctgaaggaggaggtgaatcctagaaacagcccaatttcatctccatatacccctactccaaacaggtttccaaattgcaaaaatggctgataaaaaaaattctttaagctgatgtaaaaactaatgccctcctcctcctgccaattttgctactcttgagcaagatctcagcagctccacttggatgctggaaatatatgccagaggagacttatgatgctaatttcctttagtaaacagttcaaatcttgtcttggacaccaatgaaataagaaaagctagccacaggctgtgtggaattccttcctcttaacactaagcatcaggcattccatgacttttgctcttgggatggcaaacatgaatgtttctagaacactgagttttccagcatataccttttctggttattttcaataggtttggtgtgaaaaattaacgaattcactatttgttgctggacagtccctctggaacaaagaactgtgtgtcaaataccagctgaataatcaagcaaacatttgcattctttttttttttttaaagacagggtctggctctgttgcccaggctggagtgcagtggcgtgatcacagctcaccgcagcctcaacctcctgagctcaagcaatcctctcaactcagcctctcaagtagctgggactacaggcatgcactaccacacctggttaatttttgtattttttgtagagatggggtttcaccaagttgcccaggctggtctcaaacttctggactcaagcgatccgcttgcctcagtctccccaaatgctgcaaatacaggcatgagccactgcacccggtcaacatttgcattctcgtcgaaagatcacgtgctttttccaaagcatgtgagagttttgcatcgactccagccagcttagacctaatgtgggtcctcccctttcaccaagaggacccggctattgcagatgcccttgcaagttacaaaacatgttctccatcaagccacacagggttatggatcggaaaggcagcccaccctgatgaaaaccacagtcgcggtacagattgttttgtttttgtttttgtttttccagaacactgatatgtatcctcaatggttaacattgtgtcctaaaaggtgtttttctgtttcttaacataccagaaacaagatggtctgagaccgcgaccttcacactagggtcatatttcaacacagaaaccagggtagcatcacccagaaaaaaaaaagggaggggaggtaaatcagactgtcccaaatctagggcctctctcagggcacaagaaacagccccagagggcccccatgggtcctgctccctaaggccatttgtccctcttcactgtggtacagggtggttctgaaacgcaccctaactttagtgatgacacagggtccggcaagtatccagacctatagtccagcagactttccatgaagacctgccctaaaatgaatatcgacacttggccagaagcaacaaaataacattccactctgctggaaaattgaggcgggggcttaaaggcttattttaacagcttaacagcttagcaaaataaatctgctgtcattatacacagacaaatgtcgtttatgtctcttgcatctatgagacaatcaagatttcatgatcacaccccatttactcagtgaggctaaagacaggaaggtcaagagtattaacaattatataattatcctctgcagtaaaacaattgaggcattccactcaaatcagaaatgagactgggctgaccatattcagctgcgtcactgaacactgttctggaagttcctgccataacaaggttaacagcaataactggtctaattattggcaaaaggcaagaagtcatcattatctgcagatgctgcaattatagagttggaaaattgaagggaatcaattgcagggcttttagaactagtaagcatttaataaggtagcagtaagtaaagaaaacacaatccctgtcccctatgctacaaaataatcacttttaatacttcaaaacatctcccttatattagatgatagacacacggatagatggagagatgaatggacacatggatgggtggatgaatgggtgggtggagggatggatgaatgaataagtggatgtatgcatgggtggatagatggatgagaagattgctgggtgagtggttggaagggatggagggacaggtgtgtggattgttggcagagtagacagaaggatggatggatggatggatggatggacgtctgggtgggtggatggatggatgaatggatgagtggatgtatggatggatgaatggatgagtggatgtatggatggatgggtgattggatgagtggatggatggatgggtgagtgaatggatgaagggtgactgaatgaatggatgggtgagtggatggatgatggatgaatgggtgagtggatgaatggatggatggatggatggataatagatggtgggtggtgaatggactggatgaatggatagatggatggatggatgggcagatgagcaagtggatggagggatgatggatggatggatggatggatggatggatagatggatggatggatggatggatggatggatggatagatggatgggcagatgagcaagggagtgatagatataaagccagcaatctaagaacaatgcttacaagaagtagacaaactgtgtctgaagcaaaatcacaaaacatttctaagaacaggaaagaacccttgggaaaatggagaggaaatccatgacataggagagtacaagtaaatactgccaaggtgctccttctctccatcaatttatggacttcacatacaatcaaccccataaagggcctctgggtctgtgttttccttttcctttgcttccctttttctttcttggaacttagctacagtttttaaacttttggaagcataaacaaagcaaggatgcttttgaaaaatgaaaaagaagaattactctggaggatacatttacagtctttttttttttttttttttttttgagacagggtcttgctctattgcccaggctggagtgcagtggcacagtcatggctcactgcagcctcgaactcctggagtcaagtgatgctcccacctcagcctcccaagtagctgagaccacaagtcagtgccaccatgctcagctaatttttctttttcttttttttgtttgtttgtttttgtttttgtaaagatggggtcttgctgtgttgtccaggccggcctcaaactcctggcttcaaggaagtcttctgcctcaacctcccaaaacactgggtttacagacatgagtcagcgtacccggctcagaacttttatccatattgttctcggccacattctcagaggctcgcacagcacctggctctcagcagatggacagaaggcacaggtcaatgaatgggcagcttaggtagggaagatggatttgaaggccatgtaagcagttaaagggatgggactcagtaattgatcaggtgtagcaatgagggagagaaagattcccagctctagactgaggtcaggctgtgagctcagagcaaagcctgcagttcatcttggtagcagctggatcactttgagcacagtgctgacctttctgtcagcctcaacttctccctctgcaaattaggaatcctaacagtgtccacctggtgaggtcactgaggcgatgacaggataaaccacaccaagtgtctagctcatagcatggtactccacctttcagaaatattaccttggctgggtgaggtgcttcatgcctgtcatcccagcactttgggaggccaaggcaggtggatcacctgaggtcaggagttcgagaccagcctggccaacatggtgaaaccccatctcgactaaaaatacaaaaattagccgggtgtggtggcgggcatctgcaatcccagctacttgggaggctgaggcagggagaatcgcttgaatccgagaggcggagattgcagtggactgagattgcaccactgcactccagcctgggtgacagtgagactccatctcaaaaataaaaaaaaaataaaaaatattagctcaaggcctcctctaggagagattaggtcagactgttcctcctgcagcaaggccctttgcagtatggaaaaacctcagaggtctgtgcagaagagagactatctagggacagatttcaacaaagccagtgccaaggaggcgcgtgtctacagcggagctgcggcctttagaagcctccagcctcccctcctggcatggacacagggaagccaactcccttggccagagccaggagccaggagccacaccagctcgctgatttccagaaactcacaattgcccacttactcggcacagcctgtgcgccacggaggaaactggaaaggagggatctccttggaacattctggcagctcagcaaagaggggggaagaattaatttcggatcctgaatttgcatctgcaaatgctgttttcgttcaaacgctttgtgttgtcttgtttttggtggtgttttttgtttttttttttttttttttttttgagatggagtctctctctttcgcccaggctctagtgcggtggtgtgatctctgctctctgcaacctccatctcccaggttcaagtgattgtcctgcctcagcctcctgagtagctgggattacaggtccccaacaccacgccctgctaatttttgtatttttagtagagacagggtttcaccatgttggtcaggctggtctcgaactgctgaccaccagttatctgcccaccttggcctcccattgtgctgggattacagacatgagccacggcacccggccctgtgttgtcttgataagagtttaaagtgactggatgttggggctatatatccaccaccaacaacctgccatacatccttttaccctcaaatttttgctctttgaatcctaactgctcctggcagtaaaccccatctaggactacctgccaacataccttaaacttttctgtctctttttttttttttaattatagagacagagtctcactatgttgcccaggctattcttgaactcctgagctcaagcaattctcccacctcagcctcccgaagtgctgggattacaggcataagccaccacactcagccaaacttctcaaacaatactcttcttaagccatatctcaggctctcatatgccctactttttgcatgaggctaactatttctttctctacccgcttcttcaataaaaccaaactaaacaataataatcaacaatggtgatagtaatcattgtaacacctcattcccgggggtactgggaattcactggaaagggctgggatgaggcaatgtcctccattttgttttcagtggtggttacacaggtgcatatattttttgtcaaaattcattgaactcaatgcttcagatctgtgcattttattttattttatttattttgagacagagtctccttctgtcaccccggctggagtacaatggcctgatcttggctcactgcaacctccgcctcctgggtttaagcgattctcctgcctcagcctcctgagtagctgggattacaggaacgcaccatcacgtctggctaatttttgtatttttagtagttggccaggctggtttcaaattcccgacctcaagtgatctgcctgcctcagcctgtcaaagtgttgggatgacaggcgtgagccactgcaccccggccatgtgcattttattgtatgttaaatatttcagttgttggccgggcccagtggctcgcacctgtaatctcagcactttgggaggctgagggtggatcacgaggtcaggagatcgagaccatcctggctaacaagatgaaaccctgtctctacttaaactacaaaaaatcagccaggcgtggtggcaggcgcctgtagtcccagctacttgggaggctgaggcaggagaatggcgtgaacccgggaggcggagcttgcagtgagccgagatcccgccactgcactccagcctgggcaacagtgcaagactccgtctcaaaaaaaaaaaatttcagttgctaaacttaatcaaagaaataacagtagctacaataggtcacaatgtacagctgcaatataactacaatgctagcaacaatgtaactaccatgtttatcattcccgtatcctcttctctgatcctcacaacgagcttgtgatacatgttgggtttggttttggtgttgattttttgagacagtctccctctgtcacccaggctaaagtgcagtggcgccacctcgccatctcggctcactgcaacctccgcttcctgggttcaagtgattctcctgcctcagcctcctgagtagctgggattacaggcaccagccaccacacctggctaatttttgtatttttaatagagacggggtttcaccatgttggccaggctggtcttggactcctgacctcaggtgatccacccacctcagcctcccaaagtgctgggattacaggcgtgagccaccatgcccagcctgtgataccttttggttcccattttacaaaagaggaaacagatcccggagaactccagtggacttgcccagagccccacggctactaacaggttaagcctggttccaaaccatcgtactatgctgtgtggcctggcatgtgctaggtagggggagaaagaaatgaaacatgactgcaacttttcagaaacttctacaagcaagccctgaccccgagtgctgggaaccaccctatcaatgaaagaaaccccacacactgcccactctgctgtcctgctaccctgcacatcctatgccttataccaaggatggccaatccctgcaacactgggtcacccaggaaagctaaacgtcttttgttttttctttttctgtctttttttttttttttttttttttttgagacgcagtctcgctgtgttgcccaggctggagtgcagtggcacgatctccgctcactgcaagctccgccccctgggttcacgccattctcctgcctcagcctcctgagcagctgggactacaggcgcccgccaccacacccggctaatttttttgtatttttagtagagacagggtttcaccatgttcgccaggatggtctcgatctcctgatctcgtgatgtgcccgcattctgtcacattctgtcacacaggctggagtggtgcagtggcgcaatctcggctcactgcaacctccacctcccaggttcaagtgattctcctgcctcagcctccctagtagctgggaccacaggcgcgctatggtgtccagctaattttttttatttttagtagagatggggtttcactatgttgggcaggctggtctcaaactcctgacctcaagtgatgatccgcccacctcaggctcccaaagggctgggattacaggcatcagtcactgcatctggcccctattattttaaatggaaatggggtctttctttgttgcccaggctggagtgtagtggtgcgatcataactcactgcagcctggaactccctggctcaagcaatcttcccgtctcagcctcctgagtagctgggactacaggcacatgccactacacccaattaatttttaaattttttgtagagatgggggtctcgccatgttgcccaggctggtcttgaagtcctgggctcaagtaatcctcccacctctgcttcccaatgtgctgggattacaagtgtgagccacactgccagaccaagatgatttaaagtatacaggaggatgtatgtaggttatgtacaaacactacgccattttatgtcagggactggatccccaggggggttttggaatcattgaagataccaaggcacaagtgtacaatctatccaggagaaaatgaaaatgggagaatcgacagttccgagtatcaggatctaaggaggagatttcaaaacactgcttttcatatcctcccatcatgaaaacaagggtttttcaaaaatctcttcttaaaaatatttctgggcccggcgcagtggctcatgcctgtaatcccaacactttgggaggccgaggcgggtggacacgaggtcaggagatcgacaccatcctgactaacatgatgaaaccccatctctacgaaaaatacaaaaaattagccaggtgtggtggagggcacctgtagtcccagctacttgggaggctgaggcaggagaatggcgtgaacccgggaggcggagcttgcagtgagctgaaattgcatcactgcactccagactgggcgacagagaaagactccgtctcaaaaaataataataataataataacaaaataaaaaaaatttctggaaatagacttttcacagatggttgtgagggccagtattcaatcatcacttgcaatcagtcagccctgacttctcctttggcacttatctgcttaactacaaactcagtcaacagtctaaaagcaaggcaagtttcaacctgcagctcgtccaccctttgagaaccctgagaagatcattagaccactgctatgctctcccctctccaaacacagtcacgaactccctacattcttactccttgtgtctgaagatgaataaccaccctaaaattatcgctctcaactctctcacaggaaagaaaatttccaggactctagaaaataagattctgcaaatatccatgtgtctggcgctagagcttacggaagattttcaaagccacagtgtggagctaattaaattaattacaacaccctgtgaaaaatcagctgcttttcaaagatactgttaagaaagtgaaaggggccaggcgctgcagctctcgcctgtaatccaacactttggaaggatgaggagggagattgcttgagatcccaggggttcaagaccagcctgggcaaggtagtgagacctcatctttacaaaaataaaattagctgggtgtagtgatgtgtgcttgtaatccaagctactcaggaggccgaggtgggaggattacttgagcccaggagttcagggctgcagtgaactccagcctgggcaacagagtaagatcctatctctaaaaataataataacaataataataataaagattgacaataaatattaagtgctgctaaggatgtggagcaattagaactctcatacattgctggtggaaatataacagactccaaccacttaggaaaacaatctggcctttcctttttttttttttttttttaaagacagagtcttgctttgttacccaggctggagtgcagtggtgcgatctcagctcactgcaacctccacctgctggattcaagcaattctcccaccatagcttggattataggtgcccaccaccacacccggctaatttttgtattttgagtagagacggggtttcaccacgttggccaggctggtcttgaactgctgacctcaagtgatccacccgcctcagcctcccaaagtgctaggattacaagcatgagccaccgcacctggcctgcccactccttatacacacttctactacacaactcatccattctgctccaggatataacctcaagagatatgaaggcattggtccacataaaagactcctacacaattgtgtataacaggttcatgcaggtttatgaataatagccaaaagttgaaaacaacccaaatgtctctcaacagctaaaatggtgaaactaaatgtcgtctctccacacaatggaatgctactgaacaacacaaaagaaatacgctattgataaatgcaaaaccatggatgaatctcaaaacattacaccaaagaaaagatgccagacattggccaggcaccatggctcacgcctctaatcccagcgctttataaattacttagtctcactcttatcctaagtgaagtaaatcaggaatggaaaaccaaacatctatgttttcactcataagtgggagctaacctatgaggatgcaaagtcttaagaatgatacaaggcccggcacggtggctcatgcctgtaatctcaacactttgggaggccgaggcgggcggatcatgaggtcaggagatcgagaccatcctggctaacacggtgaaaccctgtctctactaaaaatacaaaaaaattagccaggcatggtggcaggcgcctgtagtcccagctactcgggaggctgaggaaggagaatggcatgaacccaggagacagagcttgcagtgagccgagatcgcgccactgcactccagcctgggtgacagcgtgagactctgtctcaaaaaaaaaaaaaaaaagatacaatagactttggggactcagggggaaaggataggaagtgagtgagggataaaagactacaaattgggttcagtgtatactgctcgggtgatggatccaccaaaacttacaaatcaccacgaaataatttactcatataaccaaataccacctgttcccccaaaacctatggaaataaacaaaaaaacaggccagacgcggtggctcacgcctgtaatcccagcacattaggaggccaaggcaggtggatcacgaggtcaggagttccagaccagcctggccaatatggtgaaaccccgtctctactaaaactataaaaattagccgggcgtggtggcaggcacctgtaatcccagctactcaggaggctgaggcagaagaatcgcttgaaccggggaggtggaggttgcagtgagcagagaccatgccactgcactccaacctgggcaacacagggagactctgtctcaaaaaaataaataaataggctgggcgtggtggctcacgcctgtaatcccagcactttggaaggccgaggcgggtggatcatgaggtcaggagatcgagaccatcctggctagcatggtgaaatcccgtctctatttaaaaatacaaaaaattagccaggcatggtggcgggtgcctgtagtcccagcaactcgggaggctgaggcaggagaatggcgtaaacccgggaggtggagcttacagtgagcgaagatggcgccactggactccagcctgggtgacagagcgagactccatctcaaaaaaataaataaataaaattaaattaaattaaattaaattaaatttttaaaaatttaaaaaatacccagtctcagatagttctttatagcaatgtgagaatgaactaatatcctctcatcccaaaatcaaaatgttcagttatgtacaaaaccaggaagaaaaaggcaaaaaagggaaggggaggtttccctccatcttgggcatgtttttatactcattcatttcccagaggaaggatggaaagaaaatcctcctagaacagacttgacctggccaaacaagccctgaaatcatttgaagagaccaggattgaatgtagaatcataaagtaaatccataactgtttccctcccacactaaggaagttctccatctctcaaaatccaaaagcaaatgaaataatagagggaaaaaaaaagcaccaagttcctggacaaatgccacattccacatcaacatagaaaacgtccacgggcaggagatggactttccattgatgcaacagaaaatggaaaaagaggccaggctcagtggctcacgcctgtaatcccagtactttgagaggctgaggtgcgtagatcacttgaggtcatgagttcaagaccagcctggccaacatggtgaaaccccatctctactaaaaaatacaaaaattagccgggcgtggtggcatgcacctgtaattccagctacccgagaggctgaggcaggagaatcacttgaacccaggaggtagaggttgcaatgagctgagatcacgccattgcactccagcctgggcaacagagtgctccatctcaaaaaaaaaaaaaaaaaaaaaaggaaagggaaagtgaaccaaaaagtgaacccagccatgagtctcatctctcgtctcagccttcaaagaatcacaagggtccaggccggagaacttttgtactgccctccattccctccatattcctcactggaaagaggctcctatgggctaagtctctcaatgggccccatgcttcaatcaggaaggggtgggcttccactatgtgtccccaaaacttgggcagccacaaacagatatttgtagacccgtgtttttcccagcgttagttacaatggccagaaggcggaaacaacccaaatgtccatcaacagatgaattctcaaaaaaaaaaaaaaaaaaaaaaaaggttaagatggtcaattttatgatgcatgtcctattattactacaaaaaaaaaattacagatttaaagaagagcaactgaagatatccaaacatcagcatctcaaagagatttaaaaagatggatgcttattagtctaactgggtttctatctggccacaatttcaagtgagaaaagcaaagcaaagcacaattgaaatgctgggtaaagaaatgcaatgacagcagcaaagcatttccgacacttcaatcccttgtgcacctctttgtgacgttgccaatgcagagtccctgaagaaaaaggcccagcccccccaccccaaaacagctcccagggaaagaggaggaagaggtaggaagacatggctaagaagcatacagagagattcccagtcttaccaggaatcagggagatgcaaaagaataccataggataccaatttccatgcactggaattaacataattttcctgcagccttgcccacatttgacatataccttaatgcatcactggtgaaactgtcacagccaccttggagaccattcggggagtatatactagatctaaaaatgcacatactccattccctgtgacttcaattctgaacatcaatcctagaaaaccattcacaaatgggtaggaggagatggacaccaagatgttcattgcagcattgtttataaaagaaacaaaccggaaacaatctcaatgcctcccactaggggagctggtgagtagcatgtggcttattcatacaagatactatgtagcacttaaaagaatgaactagcaatactgaatcaagaggcataaacttaaagaacatagtggctgagaggaaaaaaaaaagcatttggcttaagaactcatgcagcaggtgtagcaattggaatcacaatcacaaaaatatcatatgtgtgcatggtgaggaagatcgcagagttttttgttttttggttttttttgagacggagtctcactctgtcgcccaggctggagtgcagtggcgccatctcagctcactgcaagctctcgcggagtatttttaaagactagatccattacagcaggaccagccacgtgtggccagtcagaactgaaatgtgctttacgtgcaaaatacacaatggcttcctaagggatagtactacttagcttcccaatatatgcagatatttagaatactcaaaagtgtattacaatataaatggcagtgtttaacaccagtgaactgtatactgaaaaataaataagatggcaaattttatgatgtatattttattacagcagcgaaagatttaaagaaagatttatgccaggcgtggtggctcatgcctgtaatcccagcactttgggaggctgaggcaggtggattacctgaagtcgggagtttgagaccagccaggccaacatggtgaaaccccatctctacaaaaatacataaattagccaggcgtggtggtgcacacctgtaatctgagccactagagagcagaattgcttgaggcaaggcggaggttgcagtaagccaagattgcgccattgcactccagccagggtgacaagagtgaaactcgttgtcaaatacaaataaataaataaatagatttaaagaacaactgaagataacccaaaatccaaaatcttaaatgctccaaaatttcctggcccgaaaatccaaaatcctaaatgctccaaaattcaactttttgagcgccgacatgatagcagtggaagaaaattccattcctgacctcttgtgacaggtcacagtcagggcggtgaaaaccttgtttcccgcacaatattactgaaaatattgtatacaattacctccaggctatgtgtataagatgtacatgaaacataaatgaatttaacgtttagacctcgttctcagccccacagtatctcattacatatacgcacatattctaaaatcccaagtgggaaacacttctggtcccaagcattttgaataagggatactgaacctgtatctggcattgacgtgtgtacaaggttatgtgtcaaaatacatgcagggctggaagtttatgtaccaaacctaagagagttgttacctctgggaagaagggaggagaatatagcaagggaagatgacaaagagaactccaactgtatcttacattttattactttcacttattcactttttattttattttgtttttttttttttttttaagagatgaggccttgccctgttgtccaggctggagtgcagtggtgtgatcgtagctcactgcagcctccaactcctgggctcaaatgatcctcccactttagcctcgtgagtagccagaactacaagaacatgccgccacccccggctaaatttttttaaatttttggtagagatggggtcttgctatattgcccaggcgggtggatcactggaggtcaggagttcgagaccagcctgccaacatggtgaaaccccgtctctacaaaaatacaaaactttgccaggcatagtggcgtgcacctataatcccagctacttgggaggctgaggcaggagaatcacttgaacccgggaggcagaggttgcagtgagctgagatcgtgccagtgcactccagcctgggcgacagagcgagactgtctcaaaaataataaaataaaaataaatcagctgggcatggtggcacatgcctgtgatcccagcacttggcagtatccggagacatttttggttgtcatgacttggggttgctactggtattgagtggaggccagggatgctactaagcttcctgtaatgtacagggcagtccccaccacggagaggggttcagcccagaatgctaacactgttgaggctgagaaaccctgcctaaactcattaaatttaaaaaaagaagaaaacaagccaggcacagtggctcatgcctgtgcactctggaaggccgcagtaggaggatcactggacgtcaggagttcgggactggccaacatggtgaaaccccgtctctactaaaagtacaaaaattagccaggtatggtggtatgcacctgtaatcccagctgcttaggaggctgaggcaggagaattgctttgaactcaggaggcagaaattgcagtgagccaagatcatgccactgcactctagcctgggtgacagagtgagactcttgtctcaaaaaaaaaaaaagaagaaggaggaggagaaggagaaggaaaaggagaaagagaaggagaaggaggcaagccagatgtggtggtgtgttcctgtagccccagctacttgggaggctgaagcttgaggatccctttagcccaggagtttgaggctgtggtgtactatggctgtttctgaatagccactgtactgggcaacatggtacacatctttttaaacattctttctaaaaacagcaaatttcattttatgtgtgacttttactataaataaaaatgtttttaaaataataaaagttcagccgggtgtggtggctcatgcctgtattcccagcatttgaaaggctgaggaggagggcagatcacttgaggtcaggagttcgagaccagcctggccaacatggtgaaaccccgtctctactaaaaacacaaaaattagccaggtgtggtgtgggcgcctgtaatcccagctactcaggaggctgagacaagagaattgcttgaacccgggaggtggaggttacagtgagccaagatcgcaccactgctctccagcctgggtgacacagcgagactgcctcaaaaaaaaaaaaaaaaaaaacagctacaactctgcaactctggtgtaatatcatgaaaccaaaaatatttgcatgttgtgtaccacagaagctatttataaatgaaaattttggcctaaaaaaaaagaaagaaaaggaatccaaatcagaactcctctaaaaaagcagtaccctgttttcagtgttgggctactgctaaagcagagaaaaatgaggttttgggaagcgggacagattcttagagccatgttagcaaaattaccaaaccccatccccccaacacagacacacacaccactcttagtcttgaacaataaagacatacaaggagcacagactccagatggcagactaaaaaaacattattagatttccaatgaaaacttttgctgtagtggttctaacgtgacacagccctacaaaaataaagatgaatcacggcccatttcgaaggagaggtctgactgccttacgtcacagccagtcacacactgttttggtttttttttttttttttttttttttttttgagatgcagtctagctctactgcccaggctggagtgcagtggtgcgatctcggctcactgcaacctccgcttcctgggttcaagtgattctcctgcctcagcttcccgagtagctgggattacaggcgtgcgccaccacacctggctaatttttgtatttttagtagagacggggtttcaccatgttggccaggctggtctcgaacccctgacctccagtgatctacctgcctcagcctcccaaagtgctgggattacaggcatgagccaccgcacctggcctaaattttttcttaagttatcaaagaattgcttccccccaaaagttatggcaccataaaatttgtcaatgaatactcagttacctgctatttcattttatgtggctagaacacaataaataatccaaactgatgaagacattgcaaaataaaaccaaccaaaaacatagcccaatttcactcatgaacacagatggcaagaattcagaaaacgaaacaaagcaaacctagcaaatcgaattcaacgttatgctgaaagaataattcatcacaaccaagtaggttttaccacaggaaagcaaggatgattttatattaggaaatctattaaacatagatgtcggataataccattgttaaatatttaatgttagtctagaagccctggtcaatagaataagatttaaaaccgaaacaagaggtatgattttagacataatttttttcatgcttccagaactgagcagacataatttttttaaatgaccataatttgtagaggacgaaattgcacacaatgaataaaacaatttaaaaacctaccaatcaatttcactaaagtatctggattcagggtaaatatgctattcatagtagccataactaacacaacaaaactctgtgatacagaaatcaggaaccatcgtcacaaaaataatacaggataaagatgaagaaaggacaatataaaagatttgaacaaattggctgggcgcagtggctcatgcctgtcatcccagcactttgggaggccgaagtgggcagatgacttgaggccaggaattcgagaccagcctggccaacatggtgaaaccccgtctctactaaaaatacaaaaattagccgggcatggtggtgtgtgcctataatcccagctactcaggaggctgaggcacaagaattgtttgaacttgggaggcagaggttgcagtgagccgagatcgtgccactactctccagcctgggtgacagggcgagactctgtctcaaaaagaaaaaaaaagatttgagcaaatggaaaaggagatcccatacctgcccggaaaggaaaaatacgaaagtattgatttcttaatttatggattttaacccatttttccatttgtcccaagaataatctattctctaatcctaatgtaacattatagacatttctgttacattaagattagagacaagttctgtttagaaataactccaagaaccgttttatattttctcatattgaaaatcagtcagatttgcttcagcctcaaagaacatgtttatgtaaaattaaaggagtgctggcagcgagctgcactttttttcctctgggaaatgggttatgtttttaattaaatttttaaatcaatatctcaatgggtttttttgtttttgtttttgctttttttttttttttttttttcaagatggagtctcgctctgtcgcccaggctggagtgcagtggcatgatctcggctcactgcaagctccgcctcccaagttcacgccattctcctgcctcagcctcccgagtagctgggactacaggtgcccaccaccatgcccggctaatttttttgtatttttagtagagacagggttttaccgtgttagccaggatggtctcgatctcctgacctcgtgatccacctgcctcggcctccccaagtgctgggattacaggcgtgagccaccgcgcccagccctcaatgggttttatatgagagtgagaggagggaaatatttagttcaaccagaaaaggaaacactcttctaaaaggtgtaatagggaaaaaactagatttgccactttataaagcatgttcttaccaggcatgagcttgtagtcccagcaacttggaggctaaggaggatcacttgcacccaggagtttgagtccagcctaggcaacacagtgagcccccattctttttttgaagacagaatctcgctctgtcacccagactcaagtgcagtggcacaatctcggctcattgaacctccacctcccaagttcaagcaactctcctgtctcaggttcccaagtagctgggactacaggcatgtgccaccatgcccggctaatttttgtatttatagtagcggggtttcactgtgttggccaggctggtctcgaactcctgacttcaagtgatccagccacctcggcctcccaaaatgctgggattgcaggcatgagccaccacgcccagccgagccccacttctttaaaaacaaaacgacaacaaaaacaaaactaaaaaaacacatattctaaatctataaacagtatggtactgggataagattaagacacagaggacttgaaatagaattgatatcccaaaagcaaattcatggttttggttgaatttaatacctgatgaagaaaacatcaagaattactggggaaggaattggttattcaacaagtggaattcataaagttaaattcctactcaaaaaaaaatcatttaatgtcctcagtcacaccatacacagtcctgatgtccaattgagctccaaattctgattaaaatgttattgtactcatgaacctaaaataagaggtttttaaaaaaatgttttatgagccccactgtttcccactccagggttctttggcagatggcaaacagggccacaaattcttcctcttccatcaacaggtaaagactatattctccctttccctcccagctcaccttagccaatgggatgttagcacacaagatgcaaacagaaactcaaaaggcacttttgtactggaaattgatctcttgccactcttggaacgctgagactatcatgtaatctaagcccaaactagccaactggaggatgagcagctacagggaagaaaaccaaggcctcccagctgacagccagcaccaaccaccagacatgtgagtgaggccatgctagaccatccagctaccagacaacccactggttgatcccagacatgagagagaaaagagcctgtgtttgtggtcagctggtgggtctaaacaagaaaacttgcccagcgacccaaagaatcatgagctaagtacatgattgttgattaagccattacgtttcagagtagtttgttacacagcaaaagttagctgataaaagttccatgattgaacgtggatacaacaagttcccagttttatgtttcagggtggtttgttacacagcaaaactagctgatacaagctccatgattgaacttggatacaacaagttctaagttctatgtttcagggtggtttgttacacagcaaaaattagctgatacaaactccatgactgaacttggatacaacaagttccaagttgtatgtttcagggtggtttgttacacagcaaaagctagctgatacaagctccatgaatgaacttggatacaagttcctagttctatgtttcagagtggtttgctacacaggaaaagctagctgatacaagctccatgattaaacttgaatataaattccaaggtctgtgtttcagagtggtttgctacacagcaaaagctagctgattcaagctgagagccctgtgttgccccagttaacacactgcccccacctcatggcttaagtgaatccaaatagattcccattactggcattcatgtgttgactgagacactcagtgctgagccaggaagacaaactcaggctggggttctctcccacggccccttccccatccttaatccacttcctccaaacccacacccattttactccacttaagctgcaatgcactgttctctgttcccagagaggagaagccaggaaggagctgacacattcctcattcttggtgacccacagacaagacactctgagccccggtcaacacacctactccttccttgttcctcttctcgattagatgtacctataatagcctctttgttgtgatcaactttcccaagccactccttcctctctattccagggactctcaaggggtggagaggttgaaaaaacattcaacggtatattttatatttagaggaaaaaagaacaaactccaagtagggaagaggaactggatttttatttttatcgaaagaggggatataccagttcaaagctgaggaaaaccttggagactggttcccttatcatgtcctcatgatagaagaaaaaacagacattcagaaaagctagacaatttgcccaaggtcacaaaacagatataggcttcaaatgcaggcctgtctgactccagaacaatctttcatcatggaatgaaaagttctaaggcagaggtacccaatacaagtttttgcagtgatagcaacattgtctgtctgcattgtctaaatatggtgagtacaactgagggacaaatatctaattttaatgaatttctacttaaattgccacatgtggctgtggctggcagagctaccttagtggacagcgtcattctagaatttcactaagttggttctatatcactaccaaaagcaggacccagacaggtgcagtggctcatgcctataattccagaactttgggaagccaaggcaggaggatcacttgagcccaggagttcaagaccaacctgggcaacacagcaagactccatcttttattttttattttttatttttttatttttggagacagggtctcgctctgtcacccaggctggagtgcagtggcatgatcttggctcactgcagcctcaacctcccaggctcaagcaatcctcccacctcagtcccccaggtagctgggactacaggcgtgcaccaccgcgcctggctaattttgcaaaaatattttttaaaaattagtcaggcacggtggttcatgcctgtagtgccagctacttgggaggctgaggtgggaggatcacttaagcctgagaggttgaggcttcagtgaggtgtgattacatcactgcactccagcctgggcgacagagggagaccccatctcaaaaaaaaaaaaaaaaaaaaaaagcatgaccctcaacatacatacccacccacccagaagaagtggcaactgaaagatttcagaaagactttaagggacaaatagcatgaggaaaatgaagttatgagtaaacctgggaaagcccttcataaatattctaatgtcctctaaaatacagtagacaacccacgccattcgacacttaactgagttagcaagaacaagttctgaagaatggattatcctggactattcccggttggccagaatttttttttttttttttttttgagacggagtctcactctgttgcccaggctggagtgcagtggcgtgatcttggctcactgcaaactctgcctcccaggttcaagcgatggtctcctgcctcagcctcccacgtagctgggactacaggcatgcgccaccacgcccagctaattaagtatttttagtagagacagggtttctccatgttgatcaggctggtctcgaactccccacctcagatgatccgcccacctcggcctcccaaaatgctgggattacaggcgtgagttactgcgcccatgtcccccagtatcttttgaagccatcctttcaaaactaaaagtctgtgaagaattacactttcctctgaactacattgacaaatttaagaccatcctctaacttttttcctgcatcaaattcatccttccctgggaacctctttcctttcagaggttcagctatcgctctccccgtgacatctgtgatgacgtcttctgcccattccatcttctttaccaccaggaatcctaaggtaaacctcttgctttttttctcaccccagtaaaattcctttgcaaataaccttcatacctttctcgcttataaaaataattttcttagcaaaacttgccttcgtcaagaacacaaagttttgttatgaagttcggtctgtgccctgtttgtcagacactaaaaaaagggaggcccgtcggcaccgttttaccgcagaaccgaattcccagatggaacctcatatagctttatcactcaagtatggatctctagacaaatatttagtctggcccatttttaaaaaatgggtacacctgtaatcccattgaattgggggaggctagtgtgccagaactgcttgagccctggagttcaagaccagcctgggcaatatagtgagactccatctgtacaaaaaataaattaaaaaaaaattagcggctgggcgcggtggctcacgcctgtaatcccagcactttgggaggccaaggagggtggatcacgaggtcaggagatcgagaccatcctggctaacagggtgaaaccccgtctctactaaaaatacaaaaaattagccgggcgtggtggcaggtgcctgtagtcccagctactcaggaggctgaggcaggagaatcacttgagcccaagaggtggaggttacagacagctgagatcgcaccactgcactccaacctgggcaacagagccagactctgtctcaaaaaaaaataaaataaaataactgggcatggtgacaggggcctgtagtcccaactactctggaggctgaggtgggaggatggcttgagaccaggagttccagactgctgttagctatgatcatgctactgcactccagcctgggtgacagagcaagaccctgtcgaaagaaaagaaagaaagaaaagagagggaaaggaaaggaaaggagaaaagaaagagagagggagggaaaagaaggaaaggaagaaaagggaagagaggggatgggaaggaggagaggggaaggaggggaggagaagaaggggaggggaggggagaaaaatgaaaggaagagagagaaaaagaaagaggagggagaaagggaaagaggaaggaggagggagagaggaagggagagaaggaagggaggtaagaaataaaaagaaagcaaggaagaaagaagaaaagaaagaagaaagaaaaggaagaaaagaaagaaagaaaagaaagagaaggaaggaaggaaagagagaaggataaagggaggaagggagagggagggagagaaggaaggaagggaggaaataaagaaaaaggaaggaaggagggagggaaggaaggaaggagaggagggagggagggagggcagggaggaagaagatgagagttcgggcaaccgtgtttaaaaaacggtgtgtttttctttaaaacaaaagaaaaagaaaaaaaatcaaagaacacaccaccactcagagccatgtgcaaacgaacagcatcaagcatggtcgcctttgaaaacagctgactgcagagagtgctgaaatggtacttgttaaataaagtcagtccaagaggtagaacctgagtgtgaccctagctctgagtctggagctcagaggggcaagcagaactgtcccaggaacgtacgatcagcaacactcagactggggactgcaccccaagccagaaagcccagctcttcaacagagagaaggtaaaaggaaagggatggagggagaacctgtggaccaggctttctgcccctcagcactattgacatttggggctggatcattctttgtggctgggctgtctctgcattgcaggacgttgaacggcatccctggcctccatctgctcaatgaaagcagtacacacacattccctggagttgtgacaaccaaaaaatatctccagacattgccaaatgtcccctgggagacaaaaaaaatcaccctcagttcaaaaccactgctagagacccaaacaaacacatcaatttattttattgtgttaatttttgagccagggtcttgctctgtcacgcaggctggagtgcaatatgcaatctcggctcattacagcctcaaccttctgtgctcaagcgatcctcccacctcagcctcccgagtagctgggactacaggcatgcaccaccatgctcggctaattttttattttatttttagtagagatggggtctcactatgttgtccaggctggtctccaactcttggcttcaagtgatcctcccgcctcagcctcccaaagtgctgagattacaggcatgagccaccatgcccggccatcaatttttttttttaatgggcaaagctaaatatttgtctacagattcacacttgggtgataaaactatacagaaagaaggaagtgatgtctacaaaagacaggacagtgactactctgggggaagaggcctgtgactaggatgtggtccgtggcatggcttttggagggggtgttctggcaaagtactatttctcaaccagagttagggattatatgagtgttgacgttagagtgaaccattaggctattcatttgtttggtgtggcttttctgaacctgtggtttttttatgtaataagatagaattttttaaagtaaaaccaaaaaaagaaaagaaaaagaaatcttgattccattaattaaatatagaattaccaactgacccagcgattccactcctaggtataacttcgaaagaagtgaaaatagcccaggtgcggtggctcacgcctgtaattgtagcactttgggtggctgaggtgggtggatcacctgaggtccggagttcaagaccagcctggccaacatggcgaaaccctgtctctactgaaaatacaaaaatttgccagtgcgtagtggcgcacgcctgtaatcccagcactttgggaggtcgaggtgggtggatcacttgaggtcaggagttcaagaccattctggccaacatgacgaaaccccatctctactaaaaatacaaaaaaagtagccaggcgtggtggtgttcacctataatcccagttactcaggaggctgaggcaggagaatcgcttgaatccaggaggttgcagtgagctgagatcacgccactgcactccagcctgggtgacagagcaagactccatctcaaaaaaaaaacaaatttaaagaaaaggaatcttgaccactttggatcaaacccgtctgctaggttagtcaatttatttgcaaatgaggaaactcttaacatcatcaccaccaatgaggcagcctgggacaagagccttgttcaccagccgacgggctttgcaggtggtcagtaaacaacgccgtgcttcgcacaccgcgtgtggacatgactagctgccagcgctttaaagcccatccttatcagacctccgagtaaaaatgttttccttccccaggtaagcccttggaaacactcggtaataaagcctattaaacaaccattctttctgggctacactcaataagccatggagtcattaaagatccaagaccctcctcgcctgggacaaaacgagaggcaaagaaacttctaggataaagaagccacagccaggcgcggtggctcacgcctgtaatcccagcaccctgggaggccaaggcgggcagatcacaaggtcaagagattgagaccatcctggccaacatggtgaaaccctgtctctactaaaatacaaaaaaattagccgggcgtggtggcgggcgcctgtagtcccagctactcaggaggctgaggcgggggaatcccttgaacccgggaggcggaggttgcagcgagccaagatcgtgccacagcactccagcctggtgacagagtgagactccgccaaaaaaaaaaaatagaagaagccacaggaccctctaccccaaaccctctaggtaggtacttgacaatggtgggcttcacctaccacatgccctacagtgtaattttttatttatttatttgtttatttatttatttaattatttgatacgaggttttgcttttgtcacccaggctggagtgcagtgacgtgatctcgactcactgcaacctccacctcccgggttcaagcaatcctcctgcctcagccccccgagtagctgggattacaggttccaaccaccagcccggcttatttttgtatttttagtagagacggggtttcaccacgttggccaggctggtctcgaactcctgacctcaagtgatctgcccgcctcagcctccccgagtgctgggattacaggcgtgtgcctggcccctccagtgcaaatttgatgatcatgctaagtccagtgtgttgaaagactttggtccacttcccaaacctgtgattggaggaaggtggcccaatctgcagccactcctcgggccccaggatgataggtaaccagggagcagaggagagcaatgctttcaacactttcttgtttgcttcccactcttgacatcatttatgtttaaaaatgagcaaacgggccgagtgtggtggctcacgcctgtcatcccaacactttgggaggctgaggctggtggatcatttgaggccaggagtttgagactagcctggccaacctggtgaaaccccgtcttcactaaaaaatacaaaaatcagccgggcgtggtggcatgcccctgtaatcccagcactcaggaggctgaggtaggagaatcgcttgaacctgggaggcagaggttgcagtgagccgagattgtgtcactgtgctccagcctgggtgacagagcgaaactccatctcaaaaaaaaaaagaaaaaagaaaagaaaagaaaaaaggaaaaggaaaaatgagcaaacaggtcggcctggtggctgacacctgtaatcctaacactttgggcttcccaaagtgggaggattgcttgagtctaagagttcaagaccagcctgggcaacatagcaaaatccccatctctacaaaaagaaaaatttaaaaaataaattagccagggatggtggtgcgcacctgtagtcttagctaatgggggaggctgaagcgagagggtcacttgaggacaggaatttgtgagctgcctgggaaacatagcaagactccatctctttaataaataagtaaataagtaaataaaattagctgggcgtggtggcatgcacccatagttccagctactggccaggctgaggctggaggattgcttgagcccaaaaggctgaggctgcagtgagctatgatcgcaccactgcactgcagcctgggtgacagagcaagaccccatctcaaaaacaaacaaacaaacaacaaaataaaaaagtagagagggaagacagaggaaaggggagataggataaggggtacaatcttgaaactccagcacacacatcacctccttttactgggaaatgcacggttctatctgacacaggcgcattgagagaaacagatcactgaaggacctgggctgccagcctgacgcacaggcgctcgctgacttccttgggtcctccccggggcatttcaggtgttcagtcacaaagaacagattttaattctgacaaagggtcgggtgacatgggaagtaaccggtcagtgagtatcaggtaggaggaaggaaaagaaaaacttgtcaggccagtcaccaagttagcagacagccaaagggaaagccgcctttccattacgatggattttaactctacccgccttcttcccaaaaggattgggccaaaaggtcagtttcaactgatagccctcagcctcccccggcccccctccccggtccccgcacccacccgctccaggaagccaggcaatggtgggaattgtaaattcgttatcttcaccactcaagatttagacagcatcatctctggggcagccaagtgaccacacggtcaactggtctaccatctttcagcgcagccttgaacccaccaaaacactttctgcccacccatcagcttatctaacctgatagttactttgacttcctccctgactcagcaaggacttcggggacgcaacaaaaagcctggctcagcaaggctgtccactcagtattggtggaaacagcccctcctaaacacagcccctgtgtgaccttcatgacggcattggagcccataaggaccctgcactggtccaagcctcccttcccggcatgaggcaccctcttcactcttgcccacaaaacgcctcttggccttctctttgccatttcatccacccgaatacccttccctctcaccctgtcttttctttttttttttttttcttgtcttgtcttttctctttctttctttctttctttccttccttccttccttctgtttttgtttgtttgtttttgagacagggtctcactctgttacccaggctggggtacagtggtgtaatcatagctcattgcagcctcaaagtcccaggctcaagcgatcctcccacctcagactcctgagtagctgggactataggcacacagcaccatgcttggctaattttttaaaattttttgtagagatggggtcttgctatgttgcccaggctgagctcgaattctaggttcaagtgatcctcctgcctcggcctcccaaagtgctgggtttacaggtatgacccaccacacccaacctcatcttctttctttgtgatccttgccacccaaaccaaagcacatctctgccactccaatctggaacaatctctcctcttttacaaaggccaacggcaattcatcttcaacccccggaagaggagccgggagcccagaaacatactctctagggtacttgttctttcctgctctacaaaatccaatcatctccaaagtgaaaagtttgtttaaaaaatttcaatcaaatttttaaaatttattttattttaaaataaaataaaaatgaataaataagggctgggcatggcggctcacgcctgtaatcccagcgctttgggaggccaaagtgggaggatcacctgaggtcaggagttcgagaccaccctggccaacatagtgaaaccctgtctctactaaaaatacaaaaaaaacacaacaattagccgggtgtggtggtgggcgcctgtagtcccagctacttgggaggctgaggcaggagaatcacttgaacccgggaggcaggggttgcagtgagccgagattgcgccactgcacttcagcctgggcaacagagcaagactccatctcactaaataaataaataaataattccaatcctggctggcacagtggctcacacctataatataatgcaacagtttgggaggttgaagcaggtggattgcttgggcccagcagttcaagaccagcctgggtaacgtggtgaaaccccatgtctacaaaaaatacaaaaattagccagcatggtggtgcgtgcctggaattccagctactcaggaggcggaagtaagccaagattgcgccactgcaccccagcctggacaacagagttgagacccttgtctcaaaaagaaaaaacaagaaaaaaaaatgccaatcatctgagtgaaaaatgaattacaactactgtggaatttttttcagtacagttttttttgtttgtttctctcctagattttttttttaaagatctttgacaacataaaagggaagaaagacgaatgagagattcaagtgggccatcattcacgttacatgctctaccctacctttttttttttttttttttttctttttttgagatggagtctcgctgtgacacccaggctggagtgcagtggcacaatctcggctcactgcaacctccgcctcctgggttcaagcgattctcctgtctcagtctcccaagcagctgggattacaggtgcccaccaccatacccagctaatttttgtatttttagtagagacggggtttcactatgttggcccagggtggtctcgaactcctgacctcagttgatccacccaccttggcttcccaaagtgctgggattacaggcctgagccaccgtgcccggcctcccccaccttatctttttctttttgttggatccccgtgtgcaggcgttacactttcctgtcttctgtatggacgacagtgacatcgccacaagggaatttatcaatattccctgttatctagagaacatcatgatttccaggtgctctgctccaaacacgtctagaagcacgggttcgatgactcactcgaaggggaaaggcggggtgggaggagggaggagggtggagtgggggccttgccttgtacatatactgccctcctccacccaaacagagagctccaaaaaaaaaaaaaaaaaatgctaatcatctgagtgaaaaatgaattacaactactgtggaatttttttcagtacagtgctctaccccacatttttttttctttttttcttttttgagacagagtctcaaaaagtaaggaaggaaggaagaaaggaaggagggaagaaagaaaaggaaagaaaggaaggaaagagggaaggaaggaaggaagtaccagcaaagggcagctgggctgtatggcctcaggccgtggtgctcccaagtcccactgaaacagcctctatccctgaatgctgaatgtccagctcatatatagacagagtctcaccctgtcacccaggctggagtgcagtggcgcaatctccactcattgcaacttccgcctcccaggttcaagtgattctcctgcctcagcctcctgagtagctgggattacaggtgcccgccaccacgctcagctaatgtttgtacattttttagtagagatggggtttctccatgttggccagggtggtcttgaactcctggcctcgagtgatctgcccgcttcggcctcccaaggtgctgggattacaggcatgagccaccatgcccggccaaaaatgtgaaaaagcattcttaagccaggcaagcacagtggctcacgcctatagtcccagcactttgggaggccaagaaaggaggattgcttgaacccaattgtttgagaccagcctgggcaacatagcaagaccccatctctactaaaaaaataaaaagaaattagctgggcgtggtggtgcctgcctgtggttccagctactgaggaggctgactgaggtggcagtggcctatgatcaccccactgcactccagcccaggcgacagagtgagaccccatctctaaaaataaaaataaaataaaaaattcttagctcataggtcatacaaaaatagcagctggcggactggatttggcccacaggtcgtagtttgctgatcactgggcaaaggccttacgtcagacaagtctgaagtcaaaccattccccagctaggtctcctagagcaagtctcataattcctagccatgcctcagttccctcttctgtaaaatgaggataacaaaccctcataggctgtgatgggatcccctaaggcattgcttagcacatagtaagtgctcagtaaacactagctattgatgagtgttaaggatgtcattgtcaactgtgagccaggtactatgacaggtgcttgagatacaacaaagtccctgccttcaggagagcttagtctgataggagaggccctaagtcaagacagaatgagaaggctgataagaagaggcaacacacatgttggcaggggcaaattctagatttcctctccagtttcttttccttctttccttccttccttccctccttcctttccttcttccttccttccttccctccttcctttttttctttcctccttccttccttcactccttctttcatttctccttccctcctttccttccctccttccttcctttctttcttccttcctttctccttccctccttctttccttcccgccttccctccttccttccttcctttctttccttttatttcttccctccttccttttttccttccttttcttttctttcttccctccttccttccttccctccttccttcctttctttttacagtttcctgcatttcaccaacttcccgcaatgacatctataagacacaaaggtaaagagcttggattctgagccagaatccccagcttcaaatcccatctccactacttactacccatgtgtgtggggtgcgcggcggaaggggtgggcggggcagtgttggaagtagaagttgcttaacctctcgaagccttagtggtctcaacaataaataagattgttgggaagatgggatgcaatatcctaatcaaagcacccagaaccacggctggcatgaaatcagcatttgccacaaagacaattccgattgttaaaataccaaggcaagcccagagtagtggttcacacctgtaatcccagcactttggtaggccaaggcaggcggatcacttgaggccaggagttcaagaccagcctaggcaacatggcgaaaccccatctctactaaaaatacaaacattagccaggcatggtggcacgtgcctgtaatcccagctactcaggaggttgaggcagaagaatcgcttgaacccaggaggcggaggttgcagtgagctcagatcatgccactgcactccagcctggacaacagagcgagactctgtctcaaaaaaaaaaaaaagaaaaagaaaacaaaatcaagtcaagtccagcgtggtggctcacatgtgaaatctcagcactttgagaggctgaggtggggggattccttagagtccaggagtttgagaccgacctgagccacatagcaagactcccatctcaatttaaaaaaatattaaaaactaaataaaaatgtaaaaaaataaaatatcaaggcaaactttttaaatggaagaagaaaaagaagcagagagtttccataggcagctaaaaattctgccaaaaatcaaaccctccaagagcatgcatttaaactcgtgcatttaaatacgtgatatttaatgtggtaggcacaataccacactttgagagactttgactcggagctgtaatctcagacccagggaggagggatttgctgctttcagcctccccctcctgctttggtgccgacgtccatatgtggcatctcgggttggtttcccctggcacccagcatgtcccggcctcacccacccctctggccggcagtgagcagctggggtgacctcccagaaagaaaatgccagtgggtttggctaaagcagctggtcaggcaagccctgtggcttctggtcccctcaaaatgcccagagctgagaatttccagagcatcccatgctgttggcacccaaaaatcagggtggtcttccctctggggctggaggtgtggcacccatccctcatcagcaggtcgcaagatacatgttcctctgcctgcctcaaaaccaaagtcagaaatgaggctgagccctggtagatattcacctggaagctagtctgcccagatagggtgggcccatggtgcttacttactggaagcttccaggacactcacggagcacctgaggctaggttaagtgcctccccctgcaccatctcattcaacccccacaccaccaccctaagaagcaggtcccataatgacccccatttttcagatggagaaactgaggcttgaaccagcttgtgaccagtcaatggtaaaacgagactggaagccggtgctgcttgcctcaaagaacttcttttttttttttttaaagacagagtctcaccgagtctcactctgtcgcccaggctggagtgcagtggtgtgatctcagctcactgcgacctccgcccccggggcccatgcgatcctcccacctcagccttccaagtagctggggttacaggcacctgccaccatgcctggctaatttttgtattttttgtcgagacggggtttctccatgttgcccaggctggtctcgaactcctgagctcaagcagtctgccctcctcggcctcccaaagtgctggcattacaagcatgagccaccgcgtccagctggctgaactaatgtagatctccctctaactctccccctcttctgagtgtacttggtttgatcgtgaacatctgcatttgccactagactggccgctctgaggaggcaaaggctggctcccttcctatgccctgagcgccccagaacatgacacctagtaggcagtcaataaacgaactgcatagaccccgtctccactcttcccatgtaaggcttcgtgcattggacctctcctggtatctttgccccaaatccattgcaggataatggagagagggtgtccaggctatggatcattagcacatgccatgtttttttgtttttcttttaattcccctaaccatttttttttctttttttaaaaaatggagtttcactctgtcggccaggctggggtgcaatggcacgatctcagctcactgcaacctctgcctctcgggttcgagtgattctcctgcctcagcctcctaagtagctgggattacaggcgcccaccaccacgcctggctaattttcatatttttagtagagacagcgttttgctatgttagccaggctggtctcgaactcctgacctcaagcgatccacctacctcggcctcccaaagtgctgggattacaggtgtggggcctccacacccggcccccttaaccattgaaagcctttttttggtctccctgtaaaaagtgcttaagggacaggtagaagaaggggtggatgttgctcggaattgcttaaactaggtccaaaggacaaaccagcaccttcatcctaaatgttgatgcattcccctgatgcttccagaagctgccaagtgtggaagacaaaaatagcaactacggatgttcacagaagtatctgaaaagactctgggggaaaagaggggttgatggatagttttctccagcccatttctgtcacctaagacaggggagtatcctctgaaggctcaatctattctgtattcaaaaatcccatcagacatcaaataagcctcctaaggctgggcgcggtagctcacgcctgtaatcccagcactttgggaggccgaggccagtggattatctgaggtcaggagttcaagaccagcctggccaacatggtgaaaccccatctctactaaaaatccaaaacattaactgggcgtggtggcaggtgcccgtaatccgagccacgcgggaggctgaggcaggagaatcgcttgaacccgggaggcagaggttgcagtgagctgagatcgcaccattgcaatccagcctgggcgacgagagcaaaactccgtctcaaaaaataaataaataaataagtttcctaaagcctcagcaacaaggttaatgcaggcattgaaaagctagatgcgtcaacagcagtggccctgattcacaatggcagaaatgtgaaagcgaccaagtgcccgtagatggatgaatacacaggcaaaatgtgctccctccatacaatggaacatgattcagccttaaaaaggaaagaatttccgacacaggctaccacgtggatgaaccttgaggacaacatgctcagtgaaataagccaggcacaaaaggataaatcccgtctgattccactcacaggaggtccctacagtcatcacattcatagagacagaaaataggatggtaggtgccagggggctgggagagggagatggtggagtgagtgtttcatggggacagagtttcagtttgggaggatgagaaagtttgggagatggtggtggtgatggttgcaaaaccacgtgaacgtgcttaatgccactgaaaactgtggacttaaaatggttaagatggggccaggcgcggtggcactcacctgtaatcccagcactttgcgaggctgaggtgggtgtattgctcgaggccaggggtttgagaccatcctggccaacatggcaaagccccctctgtcctgaaaatacaaaacttagccgggcatggtggctggtgcctataagtcccagtcactcggaaggctgaggcaggagaatcatttgaatccaggaggcggaggttgcagtgagctgagatcacaccactgccccccagcctaggtggcagagcaagactccatctcaaaaaaaaaaaaagttaagatgaaaaatttattctatgtgtattttatcacaatacaagaaattgaagaggggaaagaaagctgaagctgagttgctctcaaagacaggggcaacagttcaaaaaacaatcattttttggccccctggggatactgctactaatggatggctgagatatataccacatgccaggaacccggtaccccgggaagtgttagtcgcaccttctccgggtaacaaaacccccagtactggaaaaacaagcccggttctttttattgttttgttttgtgttcatttttgtttttgttttcttttgtttttgagatagagtctcagtttgtcacccaggctggagctcagtggcatgaacagggctcagtgcagcttcgacctcctggacacaaaagcctggttcttaatagcaaagcaatttttaattcactcaaaacatcaggcacagccaggcacagccaggcacagtggccgatgcatgtaatcccagcactttgggaagccgaggtgcttgagctcagaaatttgagaccagcctgaccaacatggccaaaccctgtctctacaacatacacaaaacttagctaggtgttggccaggcacggtggctcacccctgtaatcccagcactttgggaggccaaggcgggcagatcacctgaggtcgggagttcgagaccagcctggccaacatggagaaatcccatctctactaaaaatacaaaattagctgggtgtggtggcgcatgcctgtaatcctagctactcgggaggctgaggcaggagaatcgcttgaagccaggaggcagaaattgcggtgagccaagatcatgccattgcactccagcctgggcaacaaaagcgaaactccatctcaaaaaaaaaaaaaaaaaagtagccggatgtggtgacacctgtaatcccagctacttgggaggctgaggcaggaaaattgcttgaacctaggaggtggaggttgcagtgagccgagattgtgccactgtactccagcctgggtgacagaacgagactctgtctcaaaaacaaacaaacaaacaaacaacagcaacaacaactgaacacccagcagggagcaggagactcaattgcagataacaccattctggatattttgtctaaaacagatacaaaaataaattcatagaggaatgtcttaaattatatctcaagataggtaggcctagagcttttcaaacaagcactacatttggaaaactcagtaatagaataaaagaatgttcactgtttcccctggtgtcccagctagaagcagctcacttgtttctaaacagagaggacatccttcccactcctccaaaaaatcatagcttttattctggtgtatgtcttgcataaatttggcacaaaccccagttctgtcttttattagctgtgtggctctgggcaagttaagtaacctctctggtcatagtttagcttctccttgcccctgacctacaatattctcaggatttttccacagtgcaataataacggtcccctctcccaccacccttcactaacccatcttcctttttcaactatcccactcccgatttccaaccatccaacatgtcccatggaaggactcatgctgggggctccaagggagtcctcacagacaattccaaggattctatttaggtctatttaaggactcactcactctgggtggcttccccagagcgttgggctcagataagaagatcctcctttctcccctcccttctatcttttgtgatacaaccctcaagccacccacttaacttcttcccacctccatcgcatgttccctagttcttcccagggaaatgtgaaaagaagtccatgaaacaacaaacaagtaatgtgtgaatgtggaattgcctccttgagcatgaaaacatgataaaactaccatgatcagaacagtcactaccatgatcagaacagtcaccgctctgtggcatggagaggcagatctatggacacaccagaaacagaccccaaagcaatggcaaagaggtagatttctataatcaacagctgtctgaggcccccagttagctatttgggagagaaacgaaacgcccgttgagtcacacacacaaacagatctcaagtagtgaggatgaatttttttagataataataattaaaatataggctgggcgcggtggctcacgcctgtaatcccaacactttgggaggccgaggtgggtggatcacctgagagttcgagaccagcctggtcaacgtagtgaaatctcgtctctactaacaatacaaaaattagctgggcttggtggtgggtgcctgtaatcccagctacttgggaggctggggcaggagaaccgcttgaacccgggaggcagaggttgcagtgagccgagattgcaccatcgcactccagtcttaacaacaagagtgaaactccatctcaaaaaaaaaaaaaaaattaaaatataaaatgtagagaaaaaaaacctttcatgggtagaagaagactttctaagtgtaaagtacagaagtggcacactgaaatccagctctgaactccataaacattttaagcttctccagcaaaacacttcccagagcatttaaaccactgaacaacaaaaacaacaaaatgcaattggcaaagggttagtagccttcactgatgaaaaccacatacagattaattttgcaaaagctactgaggtactaaaagacaaatgggcaaaggatatgaacaggaagagaaaactcaaatgataaataaacatgttttaaaaggttcaaccccgatagcaatcaaagaaatgcaaatagaaacaatgacaacacgtcagctcctccctcccgcagtaaattatgaaagatttttcaaataacactcaaagctggccaaggtgttccctctcctccaaagctaggaggagtggccgttggcacaacatttccggaacaccatttgtcaatctgcaccaagagcctctgacccagaaattgcacttctggaaagcaagcctaaagaaacaactgctagataaagctttgactctaaaatgttcatcactctctttgtgaaaactagaaattatctttttttttttttttttttgagaaggagtttccctctggttgcccagggtggagtgcaatggcacaatctcggctcactgcaacctccgcctcccgggttcaagtgattctcctgcctcagcctcccaagtagctgggactacaggcgtgcaccgccacgcccggctaattttgtatttttagtagagatggggtttcaccgtgttggtcaggttggtctcgaactcctgacctcaagtggtccacccgcctcagcctccccaagtgctgggattacaggcctgagccaccgtgcccggcctggaaatcatcttaatgcccaataacaggaatggttaaggaaaccttcagtagacacgacagattcctgaagatcactagaaggaacaacccccaataaactactctcggcgacatgcgttgtggaataagatgaatgttttgcttttttttcgtttacaagtgtctttttccaaatgtctattataagcaatatcacttctataatcagataagaactaaactatttttttaaaaaaaccgaatctacagttttccactccttttcctctcccaagcaagaagaacattcactgactagcacaggcggtggcaaactgctgccctcgagcaaaatccggcccacgacttgtttttgtaaataaagttttattgaaacacagccacagtcatacatttatgcatgcctgtggctgcttgtccaatacagtggcagaattgagtcgttgcatcagagaccatatggcctgcaaaatctgaagtatctactatctgagtctttacagaaaatgtctgccactccctgggctagtgaatgccaccacccactattccccggcccctacctaatgaccatttaacatttttaagccataaaacattttaagctttctagaacaaggcacgagacactgcttagaaccctgtatccccggcgtacctttctggcagtgactatgagtccaacatcgttcgacaaactgcccgttgatgacggtggcggggcagttggtcttgcccttcgcggtacccggacagatgtctccacactcctcgttgtcatctttgttcaacacgatgtaattatcctccacggaatccaggatacgggaccagtcgatagtggccaagtaacagagctcattgttcttctcgatgcggacagaaccccgggtgatgttcatcaggttgtagaggccgagttccttgaggtgaaccatctcgaagatgaccagcgcgtagttaaagaacagtcgtgatccccggatgaccgtgaggttggggaacaggtccttcaggctctcgagcccatagacccggaagagcagcaagtaatcagtgatcatgatgagtttggggaaactgaggtctcggaaatcttcgggcctcgttttgaacatcaagagtatctgcaagtgtccttcgatgacagagcaattctccagctcatgcaacctagtgaggttgttccggatatccatgccgggacacactacaagagaaaatgaacagaaagcaagacaggtgagcagacgcacggtggatgcatcagaaggatcaggggcagagccggcttcatggacaggaaacctgggccctgtgttttcatcccgggccctgtaaactctgcagccagccgggatgagtagctttctctgtaaagtacccatgcctaagtaattactttcaaaacgccaagaaaataattcttttggcaagccctgttaaaatccttaaaatcaccacctctgaaatgatgcagtcgggacaatgggattacaggggattgagtaacgcggcaggtgcagaaggagaaaggggaactgtctccagtgcgtcaacatagaagatcttcaggagataatttacggggataaaggtgcccgcggtcagaaatggggcaaggaaagctaaatgtatttgttttgtcaatcctcccacctcgctggctgactttccttcccggactgctctcctgacctgcaatcaagacctaattaccttttacctgggtgtggtgagggcttcccagggagcccgatctccattgcccaaatgccctgagttctcattctcctgaaggcggtccctcccaggccccaacgcccaccatggctccccatcatcctgcacttccctcaagattctgcccctacatcccctgcacaccactaaacaggcctgcccacaactcttgcacaactccaagactcctatcctcctctgtaacatggcttatatggaagaagaagtgaaacaactcagggcaagcactcaaacagtgcctgagacatagtaagtgctgcactaatgtcagctattttgttgtttgttgttgttgttcttcttgctgttgtttattcccccaaacatataacagtcatctctaggctagtctatcttttggctggcgaagtgctttgtaccttagctccctatttctaaatccagcccatcatgcttcaagatatccagttcaaatgctgcctcctcctccaggcagccgtccctgatttcctttccttggcacacctatttgcgtgtttctcctccttgtgtcccttacacctgagttaacgtttttcaaaattgaagtctttagatggcttctctctgccaacacacccacacacccacacacacacacacacacacaccgcctccccaacacacacaccacagtcctcagcacctagaatataaggctcagtatacaacccctgcttattttgttccaaaacactaaaccttccaccaatatctttgaggaaaacagattgttctaaagaagaatagtaaatcctctaaaaaaaaaaaaaatccaccctgagaattacccacaaaagaagcacaaattagaaaaaacaataacaacgacaaaacacagcaaaagcaaacaaatgggaaaaaaaaagtagcagtgatcctggatcacattccatgcagcaaatggattaggctaagtcgagaaaacacacacacacacacacacacacacacacacacacacacacacacacacttgcttgctaggaagttggaggaaagccccagtacacaactatggattaatctccaccctcccctcaacactggctgcctggggtctgaaccaagcaggaaccctgcagggaccaagctcaggctgggaggcagcttcaagaggacaaggatgccagtcccagcccccccacccctcctagtcagggacccaaccccagtctgaggctcccagtcagtcacatcaacagcttccacatccagagatgtcaaagaaccccgcgtgccattggtgcctcccagcaagttctgtccccatcccatagatgagaaaactgaagctccaagaggcaaagaccatcactcaaggacacacaactcaccagtgactggcagggttgccagacttagcaaagaaaaatgcagaatgcctagttgaatttgaatttcagataagcaataatacctttttgaggataagtatatcccatgtaatgtttgggacataacttaccctaaaaaaaattactcattgtttctatgaaattcttgtggggtttttgttgttgttgttttgatgtggagtctcgttctgttgcccaggctgaagtgcagtgccgtgatcttggctcactgcaacctccacctcctgggttcaagtgattttcctgcttcagcctcccaagaagtgtccaacaccacgcccagctaatttttgtatttttagtagagacgggatttcaccatgttgaccaggatgatcctgatctcctgacctcgtgatccacccgcctcagcctcccaaattgctgggattacgggcataaaccaccatgcctggctggcatcctaatcttagatttggccatagccctgggcttctcaaccctgagtcccacactatatttcatttctctctctctctctctctctctcacacacacacacacacacacacacacacacacacacacactgcaggtagaaagaacacttggccgccatcctccccaggctatggcagaaccaaaatcagacatgaatatgcattcaaaggttaactagggctgggcacagtggctcatgcctgtaatcccagcagtttgggaggccacagtgagaggatcgattgaagccaggagtttaaagtcagcctgggcaacatagcaagaccccaactctaaaaaataataataataattaaatatccaggcatggtggcatgtggttgtaattccagctacttgggaggctgagacaggaggatcacttgggtccaggaataggaggttacagtgagctgtgatcacaccactgcactccagcttgggcaacagagtgagacctcgtctcgattaaaaaaacacaacggctgggcgtggtggccagctcatggctgtaatcccagcactttgggaggccaagatgggctgatcacgaggtcaggagatcaaaaccatcctggttaacacggtgaaactccgtctctactaaaaaatacaaaaaaattagccaggcgtggtggcgggcacccgtagtggcaactatttgggaggccgaggcaggagaatggcatgaacccgggaggcggagcttgcagtgagccgagatcacaccactgcactccagcctgggcgatggagcaagactctgtctcaaaaaaaaaacagaaaaaaaggaaagattaactggctgttggacattagagaaatacaaattcaaaccacagtgagataccactttatccccactaggatagctaaaaccaaaaagagtgacaattacaagtgcaaagaatgtaaagaaatgggccgggcaccgtggctcacacttgtaatcccagttctttgggaagccaagataggcagatcacctgaggtcaggagttcaagaccagcctggccaacacggagaaaccccgtctctactaaaaatacaaaaaacaactagctgggcgtggtggcaggcgcatgtagttccagacacttgggagtctgaggcaggagaatcacttgaacctgggaggtggaggttgcagtgagccaagatcactgcactccagcctgggcgacagagcgagactccatctcaaagaaaaaataaaatgtagagaaactggtatccttttgcattcctgatggggatgtaaaacagtgcagccactgtggaaaacactctggtagttcctcaaaatattaaaccaagaattgccatatgacctggcaattccactcctaggtaactacctaagagaaatgatactatacgtccacacaaagacgtgtacacaaatgtctatagcagcattattcataatagctgaggctgagtgcagtggctcacgcctgtaatcccagcactttgggaggtagagacggaaggattgcttaaacccaagagttcaagaccaacctgggcaacatagcgagtctccatctctataaaaatttaaaacattagctaggaatgctggtgtgtgtctctggtcccagctacacgggagactgaggcaggaggatcgcttgagcctaggaggtcaggactgcagtgatctgtgtttgtacccctgcactccagcctgggcaacagagcaatatcttgtctcaaaagtaaatacaggctggccgcagtggctcacgcctgtaatcccagcactgcgggaggccgaggtgggcggatcacgaggtcaggagattgagaccatcctggccaacatggtgaaaccccatctctactaaacatacaaaaaaaattagctgggcatggtggcgagtgcctgtagtcccagctacttgggaagctaaggcagaagagtcacttgaaccagagagttggaggtttcagtgagccaagattgcaccactgcactccagcctgatgaaagagtgagactccgtctctaaataaataaataaataaatgtaaataaaaggccagccacagtggctcactcctttaatcccagcgctttgggaggctgaggcaggtggatcacctgaggtcgggagttggagaccagcttggccaacgtggtgaaaacctgtctctactaaaaatacaaaaattagctgggcggggtggcgcatgcctgtaatcccagctgctacggaggctgaggcaggagaatggcttgaacctaggaggcggacgttgcagtgagctgagatcgtgcctttgcactccagcctgggtgacagagcaaaactccatctcaaaaaacaaaaaacaaaaccaaaaaaaccccacgaaacaaaaacaaaaacaaacaaacaaacaaaaacaaaacaaaattatgcctccagtatagctggaaccacagacatgcaccaccatgcccagctaatttaaatttgttttgtagagatagtggtctctctatgttgcccaggatgctctcaaactcctgaactcaagcaatcctccagtcttggcctcccaaagtgctgggattacaggtatgaaccttctccataaaagaagtcaaacagagaaggccacatgttgtctgactccattcatacaaaaaaatccgaaagaggcaaatccatagagacagaaaatagattcgtggctgccaagagctagggaaatgggggatggaaagtagtagctagagggtacagggtttctttgaagatgatgcaaatattctaaaactgactgtggtcacagttgcacaactgtaaatgtcctcaaaaccacctaactgcacacttaaaatgggtgaattgtatgtcatgtgaattctgtctcactaaagttgttatgagtaaagattaaacagctataattgtagggaacaatcaagaattgcttttctttttaaatatcctatgaatctaactcttaattcattaaagccgtatgtgtccctattagtgaaagacaatagagcagtttaccactgggacagaaaatacccagaggatgttagaaatgaaggcagaaatagacacgaggacttctgctggcttttaacatctctgagtgggcgtgaaggatgcttcaagttcttcataatgggtacctggttaatggccactctttgtacaggtagaaaaaggcaatgaggaagagggtgctaagtgacagctaatattttcttttttctttttttttttttctttaattgagacttgagtcttactctgttgcccaggctggagtgcagtggcatgatcttggcttgctgcaaactccacttctggggttcaagcaattctcctgcctcagcctcccgagtagctgggattacaggcgtgtgccaccacacctggctaattttgtatttttagtagagatgggatttcatcatgttggccaggctggtctcgaactctgacctcaggtgatccgcccacctcggcctcccaaagtgctgggattacaggcgtgagccaccgtgcctgaccaccatctccgtactaaaatatgccgaatgggccaggtaccatggctcacacctgtaatcccagctactcaggaggctgaggcaggagaatcgcttgaacccaggagatggaagttgcagtgaactgagatcatcccgtcgcactccagcctaagtaacaaagcaagactccatctcaaaataaataaataaataaataattcccacatataatcaatcctaaaaaaaaaatgattaatgagatagtccacagcagtggtccccaacctttttggcaccagggaccaatggtagaagacaatttttccacgaacacgggatgggtggtgatggttttagaatgaaactgttccacctcagatcctcaggcatcagttagattctcataaggagcaggcaacctagatcccttgtatgcacagttcacgacaggattcgagctcctatcagaatctaatgctgccattgttctgacacgaggcggagctcaggcggcaatgctcacctgccctctgctcacctctactgtgcagcccagctcctaacaggacatggactgctactggtctgtggcctaagggttggggatccctggtctgcaggatttttttcccatgacgcctacgagatgtggtgtgtgctttaccctggcagcccatctcgaaacggaggctcatttttctttaaaaataattgatttgtcgcccaggcgtggtggctcacgcctgtaatcccagcactttgggaggccgagtcgggtggatcacgaggtcaggagatcaagaccatcctggctaaccatgtgaaaccccgtctctactaaaaatacaaaaaaaaaatagctgggcatggtggcaggtgcctgtagtcccagctacactcgggaggctgaggcaggagaatggcgtgaacccaggaggcggagcttgcagtgagccaagatcaggccactgcactccagcctgggcaacagagtgagactgtgtctcaaaaaaaaaaaaaaaaaattgatttgtctatgtagattttataaagagtatcatcgaaaatgtaggtttgatgtagaagaggcaagccccaaaattgagccttaccccgggagggtttttggcttcacccaggaaagaattcgagggtgagctggtggtgttagacagcactttttttttttttggtcagagagggagtttcactctgttgcccaggctggaatgcaatgacatgatctcggctcactgcaacctctgccgcctgggttcaagtgattctcctgcctcagcctcccgagtagttggtattacaggcatgcactaccacatccagataattttgtatttttagtagagacaaggtttcaccatgttggccaggctggtctcgaactcctgacctcaggtgatccacctgccttggcctcccaaagtgctgggattacaggcgtgagccactgcgcccggccagccctgtccttgtggctagtcctccatttggtccagggctggatccccgcctctggagacgagtcccgcctactacctcaagttcacataaccaagttgttccaaatatatgggagagttttccagtaacagaactgagtactaattttttttacatttccatgaattaaataaaagtttacattgacatttcaatgaattaaagtgaaaataaaattcagtttcagccaggtgcggtggctcacgcctgtaatcccagcactttgggaggccaaggcgggtggatgacccaaggtcaggagtttgagatcagcctggataacatggtgaaaccccgtctctactaaaaatacaaaacttagcggggtcgggggagtggcgcatgcctgtaatcccagctactagggaggctgaggcaggagaatcgcttgaacctgggaggcagaggttgcagtgagccgagattgtgccattacactccagcctggatgacagagcgagactccatctcaaaaaaaaaaaaaaagaattcagtcttaccagccacaacttccagggctcaagagccacccgtggatggtggctgccatattggacagagcagatacagagtatttccatcaaagcagagctgtattggaccgtgctggtcctgaatctgagaattttccagaaggagagaaggcggacatgagagccatcttaggaagtgttcctttcttccctgattttctctccatcatgaaaacagcaggggagatgggttgggagcagggcagagaaagaactttctagaagattctgaaatcctttacaatgctaagagttttctacttcctgttttcaatcataaaggtccttgttcttcagttacaggattttttttttgagacagagtcttgctatgttgcccaggctggagtgcagtggtgcaatcatagctcactgcagcctcaaattcctgggctcaagtgatcctcctgcctcagcctcccaagtagctgggactacagctgcgtaccaccatgcctggctaatttttgtattttttgtagagatggggtttcaccatgttgcccaggctggtctcaatatcctgggctcaagcagtcctgcgtcggcctcccagtgtgctgggagtatgggtgtgagccatcaagcccggccagtaacagcattcttaaaatgctccctgctgacctattctggggcccacacgtccctttccacattctttccagtcctcaaactgcttcctcttaaattcaggaggtcctgcctcaacaagtcttgggttctggtgtcaggccaccacctataccagttttggggcacactagaaatctaacgaatctggcttcccaacccagctctgtcacctgtcaactgtgtgatcctggacaacatcttcaacccctctgcacgccttagtttcctttttatttatttattcatttatttatttttatttttgagacggagtctcactctgtctcccaggctggagtgcagtagcgtgatctcgaatcactgcaacctccatctcccgggttcaagcgattctcctgcctcagccttttgagtagctgagattacaggcgcccgccaccacgcacagctaatttttgtatttttagtagagacagggttttgccaagttggccaggctagtctcaaactcgtgacctcaggtgatccacccgtctagacctcccaaagtgctgggattacaggtgtgagccaccgtgcctggcctcagtttcctttaaatgatgacaacagcataatgaaacctacaaagaagagatgagaactggggtctctggctgtgtatacctgttctgtctcccatctgagccagatggaatccattcccagatttattacctccagaaattagagcttggacacactggggtgtcagagatccttaagattctccacctgcctgcaagaatagctttcaaatctacctctgcgagaaggaatggaggcgtctggatcaaatgcaggttctggacccggcaagtcagctacatggaaatcattcctgtattcactcagcaaacgtttgctgggcatctcggtgggccagacattgtgccaggcccagggggactctcaagacaaataaggttgcactcttacagcaagtaaaggaaagacgcacctaaataactgtgataagctaccaccagagctaaaggacaaagtactaaaacaaagaactgcagagatgttggccgggtgcagtggtcatgcctgtaatcccaacatattgggaggcataggcgggtggactgcttgagtccgggagttcaagaccagcctgggcaactggcaaaaccctacctctactaaaaatacaaaacatagccaggcgtggtgaggcgcgtctgtgctcccggctactcaggaggcttaggcaggagaattgcttgagcccaagaggttgaggctgcagtgagctatgactgcaccactgcactccagcctgggtgacagagtgagacactatttctaaaaaaaaccaaggccggacacggtggctcacgcctgtaatcccagcacttcaggaggcccaggcgggcagatcacttgaggtcaggagttcgagaccagccaggccaacatggtgaaaccccgtctctactaaaaatacaaaaaaattagccgggcacggtagcgctcgcctgtaatcccagctactcaggaggctgaggcaggagaaacacttgaacctgggaggcagaggttgcattgagccaagactgtgccactacactccagcctgggtgacagagtgagactcggtctcaaaaaaattaaaaaataaattaaaaaataaaaaataaaacaacaacaaaaagaaatgagaacagaagaatgcagatggaaacagtgaaccagtgaagacaaaggatgaaggaagaaaacaagtgtaatctgtaggacagaactgaaagaggactgtgatgaaaccctcatcatccagatcatagtccttccagaaacttatcatgtcattagtctcagaagatgtaccgaggacatctttggaacaaaccaagaagccagcaaggaggaagtcagtgaaagccctgggacctaaaagcaaagatgccccctcaggattcttcctccttgggagagaaaggcagatacccaactctggacattcataaggcagcaatttcaaaaggccggagaagaccaacaatttccagggatcatggacccaccagggaggatgagcttgagaaaacaggataccacagggtaaccaaaagagagccacacaggctgggcacagtggctcacgcctgtaatcccagcactttgggaggtcaaggggggtggatcacctgaggtcaggagtttgagaccagcctggccaacatggtgaaaccccatgtctactaaaaatatgaaaattagcctggtgtggtggcgtgtgcctgtaatcccagcactttgggaggctgaggtgggaggatcacctgaggtcaggagtttgagaccagcctggccaacaaagtgaaaccccatgtctactaaaaatacaaaaatgagtccggtatggtggcgtatgcctgtaatcgcagcactttgggagcctgaggtgggaggatcacctgaggtcaggagttcaagaccagcctggccaacatggggaaacctcatctctactaaaaatacaaaaattagccagggatggtggtgcacacctgtaatcccagctactcaggaagctgaagcaggacaatctcttaaacccaggagggagaggttgagtgagctgagatcacgccactgcactctagcctgggtgacagagtgacactccatctcaaaaaaagaaaagaaataaaataaaataaaataaaataaatatccctctagacagggcacagtggctcacatctataatcccagcccttggggaggctgacgcaggaggatcacttaagtccagaagtctgagaccaatctgggcaacacagtaagaccccatgtctataaaaataaaattaaaaaataaaaaagaaagagagaaacagccttctggcagcagaatgaagaaggtactgaagacagcatgcatagcaccacagaaaccaggggcagtttgtgtgaacaggacttcatacccaggagaaatggaagagaagagggagaagagagtgaggagggatcgtcaatgagcctgaagcattcgagataggaacagtttagagtggcaagaacaacaggctgagttggcagcatattgagtctgtgagggctttgggatactcagggatgtgggtcccgtgggcattgggaagatgggggaacaggtacggatgctggtggacgcagtgacaacaggtgatattgcaggaaaggtagcacggagacaactgagagaagaaaatgatagaaagagaggctcacgcctggaatcccagcactttgtgaggctgaggtgggtggactgcttgagcccaggagtttgagattggcctgggtaacatagcaaaaccccatctctaccaaaaaaaaaaaaattggatgggtgtggtggtgtgcacctgtagtcccagctactcgggaggttgaggattgctcgagcctgggaggtggagattgcggaggcctgacatcacaccactacactccagcctaggcgacagtgcgaggagaccctgtctcaaaaacaaaacaaggccaggcacggtggctcacacctgtaatcccagcactttgggaggccgaggcgggcggatcacgaggtcaagagattgagaccatcctggctaacaaggtgaaactccgtctctactaaaaatacaaaaattagccgggcgtggtggcaggcgcctgtagtcccagctactcgggaggctgaggcaggagaatggcgtgaacccgggaggcggagcttgcagtgagtcgagactgcgccactgcactccagcctgggcaacagagcgagactccgtctcataacaaaaaacaaaaaaacaaaacaaaacaaaggctgggtgcggttgctcacgcctgtaattccagcactttgggaggccaaggcaggtggatcacttgaggtcaggagttcgagcccagcctggccaaagtttgagacccgtctctaccaaaaatataaaaaattagccaggccgggcatggtagctcacacctgtaatcccagcactttgggcagccgaggcgggtggatcacctgagatcaggagttcgagaccagcctaaccaacatggagaaaccccatctctactaagaatacaaaattagctgggcatggtggcgtatgcctgtagtcccagctacttgggaggctgaggcaggagaatcgcctgaacccgggaggcggaggttgtgatgagccgatatcatgccattgcactccagcctgggcaacaagagcgaaactccatctcaaaaaaaaaaacaaaaaacccaaaaattagtcaggtattgtggtgcacacttataatcccagctactcaggaggctgaggcaggagaatcgcttgaacctggaaggcagaggttgcaatcagccaagatcgtgccactgcactgcactccagcctgggtgacagagcgagactcgatctccaaaaaaaaagaaaaaagaaagaaagaggggctccagggggcacagtatgaaaggccagggactaggaagggcacctgtgtcccacagccacccggacaccaacaccttctgtgaactctggaatgtctgactcctctagtctatgacatagttttgtaatcctaacaatatcaaacatcaaaccacaggattagaagggggcttccgtgctatttcaggagtcctgaaatttatacagacaagagcagacaggacacagaagacaggaggaaaaacaagagaagtcctgccagaccagaaagtcactttgtaacaggtggtatggagaccgtgtaactgggtataattaggagggaacatatgaggtcctcccttttctgatcttctgcaaggaaacaacaagatacatccttgagagtagaatgacaacaacaaacaaacacacacacacacacacagacacatacacaggcagtcagaaaacagttgtatcccaccaggcacagtggctcacatctgcaatcccagtgctttgggaggctgaggcgggacgatcacttaaggtcttgagttcgaggccagcctgggcaacacagccagaccctgtctctgcaaaaaataaaaataaaaaaactagccaggcatggtggtgcatgcctgtagtcccagctacttgggaggaggaagcgcgagaatcatttgagcccaggagttcagggctgcaatgagccataatcacaccaccgcactccagccgggatgacagagcaagaccctgtctctaatgataagaataaatgagattttaaaatcaatttaaaaaagcagttgcatccctactctcgagtcccttcctgtctgactacttttgcctgcattgataaaaagggtaatttttagacagtacctatggtttccacattcccacaaaggcaaaggaaataagaatctcatgatagcatcctgcctttcctgaacatacatcaggggcttttatataaacctgatgagatatcctacttctaaggaactggaagaaaatgccagatgtgaaattaaacattcattcccacaagtccgctttgaactccaacaggagcttagagccagtctgtacgtggcaccgcaggatagcaaagcttgttctgctggaaacaaaatatgtttctaaaaccccgcgagccggcggggcacggtggctcacaccagtaatcccagcactttgggaggccgaggtgggtggatcatttgaggtcaggggttcaagaccagcctggccaacatggtgaaaccctgtctctactaaaaatacaaaaattagctgggcgtggtggtgtacgcctgtaatcccagctactcgggaggctgaggcaggagaattgcttgaacccaggaggcagaggttgcagtgagccgagatcgtgccactacactccagcctgggcaacagagtgcgactccatctcaaaataatagtaataataataataatccttcaagccagctggacaaggtggctcacaccagtaatcccagccctttgagaggctgaggcaggtgggtggcttgaggtcaggagtttgagacccacctgggcaacatggggaaaccccatctctactaaaatgcaaaaattagctgggcgtggtggcacatgcctgtagtcccagctactcaggaggctgaggcaggagaattgcttaaaccctggaggcggaggttgcagtgagctgagatcgtgacactgcattccagcctgggcaacggagtaagactgctcaaaataataataataataggcaacatggccaggcgcagtggctcacgcctgtaatcccagcactttgggaggccgaggtgggggatcacgaggtcaggagatcgagaccacggtgaaaccccgtctctactaaaaatacaaaaaattagccgggggcagtggcgggcgcctgtagtccctgctactcaggaggctgaggcaggagaatggcatgaacccggaaggcgaagcttgcagtaagctgagatcacgccactgcactccagcctgggcgacagagtgagactccgcctcaaaaaaagtaataataataataataataataggcaacatggtgagaccccatctctactaaaatacaaaaattagctagtcgtggtagcacacgcctgtagtgccagctactcaggaggctgaggtgggaggaccacttgagcccaggaggtcgaggctgcagtgagctgtgattgcgccactgcactccagcctgagcaacagtgcaagaccctttctcaaaaaaatgtaaatgaataaatgaaataaataaaatcccgagagccactgctgcctctccctgccaccagtgttggcagagggcagggattcccctccctgaaacatgggccaggggtttttggacatctcatgaactttccaaaaggtatcaacccagcggtttccacgcagatgaaaatacaacaaaaagggcatttgcattcaaaggattctaaacggaaaatgacaaacccacagttttgtttggtttggtttggtttttttagatggggtcttgctctgttgccctggctggaatgcagtggtgcagtctcggctcactgcaacctctgcctcccgggttccagcaattctcccgcctcagcctcctgagtagctgggactacaggcatgagccaccgtgctcggctaatttttgtatttttagtagagacggggtttcaccattttggccaggctggtctcgaactcaccacctcaggtgatccacctgcctcggcctcccaaagtgctgggattacgggtatgagccacagattcaccagttttaaaccacttgcagccgattcttgttattggtggtagtttggctctgtgaaattcccctgaatgttgaactagtgaatactgaaccattgttcctaggaaaatgcgagggtaagtacctgcgaacttctggccacaacacatttatccatggatcaatacctagccttgttttatgtgtgtttctgttgaaagacactattgaatctatattgttgattcattaacaccgaactcacggccaacagtaatagaactcatgcctgaacaaagtttatgtaacacatgcctttgtgtgtgtgtgttggttttggagtttttttgtttttttgggttttttttgagacagggtctcactctgttgcccaggctggagtgcagtggcaccgccttggctcactgcaaccttcacctcctaggctcgagcaattcttgtgccttagcctcccaggtagctgagattacaggtgtgcgccatcacgcccagctaatttttgtatttttagtagagatggggtttcaccatgttgcccaggctggtctcaaactctggcctcaagtgatccacctgcctcaacctcccaaagtgctgggattgcagatgtgagccaccgtgccccgccacgctgccttttctccacaagggtggtgacagccctccttagccaaggaagagtagagagcagggcttcagcaccctggggggcatttgaaacagccccatcaccaactgaaagcacaaaaatgctaaaaatgtggcaccaaataaccacaaaaaggactcaggtttttttgttgttgttttttgttttgagtctcaccctgtcacccaggctggagtgcagaggcacaatctcggctcactgcaacctccacctcctgggtccaagtgattctcctgcctcagcctccggagtagctcggactacaggcgcccgccaccacacctggctaattttttgtatttttagtagagacagggtttcaccatgttagccaggatggtctcgatctcctgacctcgtgatccactcgcctcggactcccaaagcgctgggcatgagccactgcgcctgctcaaaaaggactagttttaatcctcagtgtgcagattgtatgaatctgacgcataagggctgaagcaagaaggtggaatgccctcttacttgacctcacatttgagactcgtacttatgagtgtcctaaaatgaccagaaaggcactgagcatgctggtttgagggttacaaatacatttgagtgagtaggtgaattcaaaaatacagggtctggggccaggtgcagtggctcatgcctgtaatcccagtactttaggaagtcaagatgggaggatcacttgaggccaggagttcgagaccagcctgggcaacatagcgagcccttatccctgctgaaaagttaaaaattaggccgggcacagtggctcgcgcctgtaatcccagcactttgggaggctgaagtgggcggatcacttgaagccaggagtttgagaccagcctgaccaacatggtaaaaccccatctctactaaaaataaaaaaaactagccgggcatggtggcgtgcctgtaaccccagctactagaaaggctgaggcaggagagttgcttgagcccaggaagcagaggttgcagtgaacccagatcacaccactgcagtctggcctgggcaacagagttagtgagactccgtctcaaaaataaataaataaataaataacaataaaaactagctgagcatggtggtgtgtgcctgtagtcccagctactcaggaggctgaggcaggaggatcgttgatgctcaagagttggaggctgcagggaattaggaccacaccactgcactccagcctgggtatcagagcaagaacctgcctctcaaaataaaaatttaaattttaaattttaaaaagaaaatatgggatctgggaatgatgaggatcaaccagactcaaatttaaaatttcaactttaggaatattaatccaattataagataaaatcttttaaagtctagagaaaactatagggatggagaacagatctgtggttaggggtggaggtggtttagtgataaaggggtgaattgagggagtttggacaacaacgagactgttctctatcctaattgtggcaatagccatacaactctacacatggcttaaaaatcataaaatggtacacctttaaaaagccaattttactgtatgataatgtttaaaatattttgttgttgttgttgttacacagtctcactatgtcacccaggctggatgcagtggtgcaatcacagctcactggcgcctcgacttcccaggctcaggtgatcctcccacctcagcctccctagtagctgggaccacaggtgctcaccactgtatctggataatttttttgtagggttttgtagagacggggtcttgctatgttacccaggctggtcttgaactcctgggctcaagagatccacctgcttcggcctcccaaagtgctgggattacaggagtggccccatgacacctagcctaaaaaattactaaacatcaaaaagatacataaaccaatggcacagttacctccctggacatgaatggaatgcttttggggacagggggacaagatttttttttattatttcttttctttttgagacagggtcgggctctatcacccaggttggagtgcagtggcatgaatatggcttactgtagcctcaaccttctgggctcaagcgatcctcccacctcagcctcctgagtagctgggactaccggtacacaccaccatgctcagctaatttttaaactttttctagagataatgtctcattatgttgcccaggctggtctcaaactgctggcttcaagtgttcctcccacctcagcttcctaaaaagtccagggattacaggtgtgagccactgcaccccaccacaagattttgcagaaggacttctgtgttttttttttcctttctacacttttgtaatttttctttttgcaatgagaatgcattacccgtcactatttaattaaaaactgtaaataccatgcagctgcaaaatatcaaccaggccaccccaagaagtattctttttttgtttgagacagagagaggatctcactgttgcccaggctggagtgcagtggtacaatcacagctcactgcagccttgcccttccagcctcaagaggtcctcccatctcagcctcccaagtagctgggactacagacacatgccaccatgcccagctaatttttgttttattgttagtggagacagggtcttgctgtgttgtccaggctgatctgaaactcctggacacatgtaatcctcccacctcagcctcccagagtgctgggattgcaggcatgagccactgcacctggccaaaaatattcttttttttttttttttttgagatggagtttcgctctgtcacccaggctagagtgcagtggcgcaatctcggctcactgcaacctccacctcccaggttcaagcgattctcctgcctcagcctcccaactagctgggattacaggcatgcgccaccacgcctggctaattttgtattttttcagtaaagatggggtttcaccatgttggtcaggctggtctcgaactcctgacctcaagtgatccacccacctcggcctcccaaagtgcttgggattacaggcgtgagccaccacacctggcccagaagtattcttaacagaaattaacacaagagaggcctgagagaaaaaaaaaaaatctcattatatacaccagttatattttgggttctagatacagggttgagagcatgaaatcctcattcaatgccaatatagctgtttaaataaatacacatggctaagtaggcaacatcacggtgatttttctcatccttggaatccgtatattcagtgcagcaaatgacacacgtttctttaacatctcttgcggtgtaaagagaaagacatagcgtttcatttcactcacttcattcgagttgtaccagggactgcacaagctattaggcatgctatcatgaatgaaacctcaaggcgtctgttccagatcagaggtcagcaaacgctgttctgtaaagggccaaagtgtaaatattttggccatggaattcctgttttaactactcaacctgccgtgtcggggcatttttgcgcagtcatagatgatgagtagacaaatgagtgtggttgcatgccaataaaactgcatttacaaaaaccgtgggatttggcctgagggccatagtttgctgacccctgttcagatgaagaagtcggaatctatgtaaatttcttagctgggcgcaatggttcctcatgcctataatcccagcacttgggaggcccaggagggaagactgcttgaactaggagttcaagaccagcctaggcaacatagcaagaccctgtttctacaaaaaaaaaaaaaaagttttaattagccaggcatggtggtgactgtctgtgagcccaggtacccaggaggcggaggcaagcaggttgcttgaggccaggaattcaagaccagcatgggcaacatagctagactctgtctctacaaataaattttaaaaattagctagtcatggtggtgcctgcctgtgatcctagtttctcagaaggccaaggcaggaggctcacttgaggccaggaaatcaagaccagcctgggcaacatagtgagactctgtctctacaaacaaatttttcaattagctgggcatggtggcacctgcctgtgattccagctacttggggaacctaggtgggaggactgctccaggccatgacttggaggctgcagtaagctaggactaaacctctgcactccagcctgggtgacagagcaaaatcctgtctctaaaaagaaataaaaattggaaaaaaaaaaaaaaaaaaaaagggccggacacggtggctcatgcccgtaatcccagcactctgggaggctgaggtaggtggatctcttgaggtcaggagtttgggaccagcctggccaatggggtgaaactctgtctctactaaaagtacaaaaactagccaggcggggtggcacatgcctgtaattccagctactggagaggctgaggcaggaccattgcttgaacccaggagacggaggttgtagtgagccaagatcatgccattgcacaccagcccgggtgaagaagtgaaaaaaaaaaaaaaaaaaaagtgagctgagagaagattaaaggaaacactgaccctctgggaagagagagccaacatcttagcccaggtagaaggagaagagaacagtaaaacagaagaacttaggcacaggtgagacgggagacacagccttccaggaggggggactggcaatgtcaaacccagaggggtcaagtgaggtgaggctgcaggagacgcaactgggagatgagagattaacttcgagagccatcggtaaagcagcggagatgcaagccagatgctgggggcagaacagtgagaaaagagtgagatggaaagggcagggaggactggcctggggaagctggacagggtggaggctggaggtcagtggtaggtaatggggattggggggtactgggtgtttagaggctgaaaaagcacgtgggtaaatgaagattcttttttcttttcttttttttttttttttttgagacagagtctctctctgttgcccaggctagaatgcaatggtgtgatctcggctcactgcaagctctgcctcccaggttcaagcgattctcctgcctcagcctcccaagtagctaggattacaaggacccgccaccacacctggctaatttttgcatttttagtagagatggggtttcaccatgttggccagggtggtctcaaactcctgacctcaggggatccgcccacctcagcctcccaaggtgttgggattacaggcgtgagccactgcacccggccgaggattattgaacaaagagaggagaaagagcaagagcccagatgggtaaatgtctcagacagggaaaaggttaactcctgcagagacgtgcctggcaatgtctggagacattagtggttgtcatgcctggggggaaggggatcctcccaggaccacatgggtggagaccatggttccagctcaacactctacatacaggacagcccccaccaccaggaatgatccagccccaaatgtcagcagtgccaagattgagagttctgcttaaaccaaagaggaatggaagtcaagggtagagtggggtgaggtggggagccctggggactcagcccacaccctgtggtctctatgcatgaatggggaagggcaagaagcaggtctccaggagagaagcaaagaataagaataactgcagaggccagacaccgtggctcatgcctgtgatcccagcacttcgggaggccaaggcaggcagatcgcttgaggccaggagtttgagaccagcctggacaaaatagcaagacttcagctctacacattaaagtaaaaattagccaggcagggtggcgtgtgcctgtggtcccagctactacggaggctaaaataggaggatggcttgcgtccaggaggtcgaggctgcagtgagccatcattgcccaactgcactccagcctaagcaacagagcaagacctcatctcaaaaaataatagatagctagagagatagatacaaaaatcacactgattttcctccacccttcatcccaatcaaaatgccatattgggcccggagtgatggctcacacctataatcccaggtctttggaaggccgaggcaggcagatcacttgaggtcagaagtttgagaccagcctaaccaatatggcgaaatcccatctctactaaaaatacaaaaattagccaagggtggtgatacacgactgtaatcccagctactcaggaggctgaggcaggagatgcacttgaacctgaaaggcggaggtcgcaaagatcgtgtcactgcactccagcccgggtgacagagtgacaccctgtctcaaaaaaaaaaaagaaaaaaaaaaaggccaggtacggtggctcactcctgtaatcccaacactttgggaggccgaggcgggtggatcacaagatcaggaggtcgagaccatcctggctaacacagcaaagccctgtctctactaaaaatacaaaaaataagccggtgttgtggaacacgcctgtaatcccagctactggggaggctgaggcaggagaatcccttgaacctgggaggtggaggttgcagtgagctgagatcgtgccactgcactccagcctgggtgacagagcaagactccgtctcaaaaaaaaaaaagccatattggttgacattagagattaatgatctgaaaagttctttgcccctccccaagccttcaagaggcatcacagcccatttatttgacaggattttgttcaccatcaccccaatcgtggggggtacggaggctcggactcaaaagaacaaagatttgttaagaaaccattgctctgcagccacactagctagattgcaatcccagccctgctgcctgctggcctcaagcgaagttttctcacttgtgaaaagggaagattaaaccgcacctcgtggggttttgccgtgaggattaactgagattatatatgcaaagcgcatagaacagcacctgctgagagcttgctcttctaattcttaggaaggtattatgcagagaataaggaactccttaagatgataaaggagcccagtacacccaggaactccaccacttgtgccccactgcagaacaaatatttactgaacacctactatgtgccaggcatcgttctgggctctagaaatgcaacggtgaacaacaacaaaccataaacccctgcccatatggaagccataaatgtgcaaagaaatggtaaatccatttactgaccctgaaagcccaggcacagatccacaattaattaccaaagctacaaggaacagaagaacagggaaccacacacacgcacacatagaatctggcatagttcgaaaccactcatcttggattttctttttatttatttatttatttttgagacagagtctcgctctgtcgcccagtggcacgatcttggctcactgcaagctccgcctcccgggtttacgccattctcctgcctcagcctccggaatagctgggactacaggcgcccgccaccacgcccggctaattttttctatttttcagtagagacagggttttaccgtgttagccaggatggtcgtgatctcctgaactggtgatccacccgcctcggcctcccaaagtgctgggattacaagcgtgagccaccacgccccgcctttttttttatttttttgagacaaagtctcgctctttggccaggctggagtgcagtggtgccatctgagctcacagcaacctcctcctcccgggttcaagcaattgtcccgcctcagcctcccaagtagctgggactacaggcgaacgccaccaaacccaggtaatttttgtattttgagcagagaagggagtttcaccatgttggccaggatggtctccatctcctgacctcgtgatccgcccgcctcagcctcccaaaatgctgagattacaggcttgagccaccgcagctggccagattttcttaacaagaactccaactaaccgccacccttcattgagcacctactgtctcccaggcacctgggggcggggctgggggggggtgggcccggggcttttagacattatgtgattgacagagtcgactcagcaaacccggttggtccactctagcacctgattttacatgcacccgtttccccatcaatacatttaagagcttcaattccttccctccctgaccccttcctcatcacgactgatttccttttatggagaaatctgaaacagtaacccaacagatatttttaaagcagggcctcagaccccacagtgggaaacccaggctatattccttaaatgattgcgccatcttcatcttacaaccccaaaggtgcctattgtcaagcccaaggaagatgctgcccacacgtgggagaggggcccatggggtcagggggaacgaaaggctcactcaaggtcaaaggctccttcatgaagcgcagggctgaggggagaggaggggtcaaggagacagcagacaagggacagtagtccagattcttgggcagaacgggacacacagaggctcaagtcctggctctggcactgactttagggcaagggagttatgcgtcctacatgagcctcagtttactcctctgtgaaatgggtgcataactgtatctgcctccgggggccactgtgacagtccagagagataagatagactaggctgtggcgtgcggtgataccaattacaataaatagggtaaaaaaccgccactacttctgctacaattgctgctgttgctaaggctttagaatttgcctccggacatctggaaacagaacccaaaagggtaaacatggacctagagtccggggtggccacgggcctagatccaaggtagttgggtagaggggggctctgcagtccctgaccccaggcagcgtcacccaccggtgaggcactcagggcgcttggctctacctacaccatatgcgctcgggggacttggctgttcggggctgtccagacccagtgaccccacttcccggccgcgacccaaagatgacgcgtgtcgtgtctccggagcgacttgggctcggaggggccggggcacgggtcggaggcgcgctccagagaggagcccgcggcggggcgggcaccggggcaaggttcctcgggctcaggtcgggcacgcagggcgcggaggcgcgagcccgggcgggcaaaggccaaggtcagaggcttcccgctccccctacgcgatgcaggagctaccgtcctggccaccgccccccgcccctggggagggttctcagtccacaagcgggggctcgattttggcttgggtggggtcctctccccatcgcggcgctccccgcccacgcccgcgcccccagactcaccctctccggggtacaggtggcccgcggcgcccagtagcagcgcggccaccgccaccagcagcggcgcggccgccgccccccgccggcccccggtggccatggctgcgggagcgcggggtctcctcggatcagagcgcgcggcgctggcccgcgggggtcatgctccgaggcggccacccaagaggcgctgggggccgcgcgtccttctcttccacgcccgcgacccgcgggccgcagcccccctgccggggagggcccagaggcagccccgggaagggcgcgcgcggcttcgccagctacaaatactgagcggaggcccttgcggtggtggccccgaccccccggccgctgcggcccgggccccgtcccaggatctcggggcccggagctccgcgctgcgcccgggactgtctctcggctctcggccccgcgcgctctgggtcgcgatctgcgggctccgggacagagggacgcgcggaccgacggactagctgactggcgggcgggcacctgggctggcgggtggcgggcgggcggcgggagagagggctgctcgggcccgtaaacaacgcggcccgtcagctgggccccgtgcgggccgcgggaaaaggcggcgcggatctggcctaggaagggactctgcgcccgggagaggcccaggagagggagggaaagcttgcaggggagggaggtgccgcccggccccgccccgccccgcccgcctccccgcctccctgtgccgggccccgcgcgggaggccctgggcgcgccgggaccgagggcgcgccccagatccgcgcgccctacagccccgagtctcctccagtttcagacccccggaggcgccccacaggcccgacgcagcggcacagatcctttctctaccattttgctattttgttcatagtgggctttggaggattcctgttgattttttaaaaaatactgcattaaaatgtttattttggtgactcgaggtggttttggtttctttctttttttttttttttcactcccttaaattttgcaccccaggcgagtagtgtctcactcgcctttcctcagtccgggcctggccagcgacactcgtcccagagcgcgtgggcgcccccagatgtcccgcccgcgagtgcgccccggcccaggggcgagacccaagccaggcccctggggacagccacgtgcccgcgtgcccagtgcgctccctgtgttcaagttggagaaatgacacctggaaaaatgtgcagacgcttctgaaagggcaaagacgacgccaaagaagacgccggagacctcgaatagggcgcaggtggacatctctgattttcagcagaccagcctgtatgtgtctgaagtctagcaacgacattcaccaacaaggcgggacagcggttccacctaccttactgcaggagaggaaggggctttcagtataggaaagccagaactcaatgggaggagggttcctccacccctcactcctgtgtggtcttggaccagggacttttctgtctctgggccagtttcacttgtgtaatgggtttaataatacctgcatgccagttctggggaggtacccgggaaagaaaacttaagaaagcgcccagcacaaccctagacccaaggcattcattcttctttcattcaataaacagtttgctaggagctggacccactgttcatgcaacaggccaaacctattcctgcctctgggcctttgccccagcatttcccttgcccgtaacactccaggatggcttcatctctgaagtgccatccctaaccatatttttgcaaatcctccccccagttccgtttccttctctctctctctctctctgtttttttttttttttttttttttttttttttttttttttttttagatggagtttttctctgttgcccaggctggagtgcaatggccagatctcagttcactgcaacatcacctgcctgggttcaagtgattctcctgcctcaacctcccaagtaacttggattacaggcatgcgccagcacacccagctaattttctgtatttttagtagagacaggatttcaccatgttggcctggccggtctcaaactcctgacctcaggtgatccaccggccttggcctcccaaagtgctgggattacaggcctgagccactgcgcctggccccttctctctcattttcatagcatgtttaccccactacctgcaattgtttgttttttttttttcttttctttctttttttttccttttgacagaatcttgctgtcacccaggcaggaatgcagtggtgcaatcctagcttactgcagccttgaactcctggcctcaagcaatcctcctgccttggcctcccaaggtgctaggattacaggcatgcgccaccatgattggccttgaaattcttattcgttttctgtgtcttctccccttcccgtgaaggcggaaatcttttcggtcttgtttcactgcttaaacccagtgcctgacaaatctgttgcttaataaatatttgttgagtgggagaatcaacaagcaataagtaataggggatttttcagtgagcaaaataaacatgacccatttccttatggagttcacaactgagccagggagagagcccttaaaataattgagtgtgtaatgagctgagggaaatgggaggtgcatagggaggggtttgctgaggacatggggttttttgtttgtttgttttttgatggatcttactctgttgcccaggctggagtgcagtggcacgatcttggctcactgcaacctccgcctcccaggttcaagcaattctcctgcctcagcctccagagtagctgggattacaggtgcatgccaccacgcctgcctaatttttgtatttttagtagaggcagggtttcaccatattggacaggctggtcttgaactcctgacctcaagagatctgcctgtctcggtctccctaattgctgggattacagacgcgtgagccactgcacctgactgaggatgtgattttgagcttaagtctgaaaatgaagaggagccatcctagggaagccatagggatgtgtttcaggtgggggaaggcatgagcaaaggcccagaggagagtgggcaaggcattcttgcaactgaaccaggcattcactgtagctgcagaaaagaaagaggagaaagtgaagccatgggtgagaactgcagtgggcccttgaacatgagtttgaaccgtgcacatcttttttttttttttttttgaggcagagtctcgctctgtcaccctggctggagtgcagtggagcaatctcagctcactgcaatctccacctccagggttcaagctattctcctgcctcagcttcccaagtatctgggactacaggcacacgccacctcacccggttaatttttgtatttttagtacagacgggattttaccatgttggccaggctggtatcgaactcctgacctcagctgatctgatcagcctcccaaagtgaggtcatctttaaacagaatgtttttcaataaatatattggaaacatttttagagatttgcaatagtttgaaaagacttgcagatgaacttggtagccaagaaatattaaaaaaaaattaggtatgtcatgaatgcataaaatatatgtagatactagtctgttttattatttttgttattattttcttttagagacagggtcttgctctgttgcccaggctggagagcagtggcccaatcatggctcactgtaacctccaactcctgggttcaagcgatcttcctggcaagcaccaacacgcccggctaatttttttactttttatagagacgaggtctcaccatgttgcccaggctggtctctaactcctgaactcaagtgatcctcctgcctctacctcccacagtgccgagattacaggtataagccaccatgtccagccctattttataatttgctaacataaaatatacacaaatctgttacaaaaagttaaaatgtattaaaacgtacacacacacttacaaaccatacatggtgttattccaagtcaagagaaatgtaaataaatgtaaagatgcagcattcaatcataactgcataaaattaactatagaatatattgtgttattgtaacaatttcatagccacctcctgttgctactggagtgagtgcaagtgttgcaagtatccgctttaaatgccatgttacattaattatctccctgtgggcagttcacctctccaggaatttgtgccccggtaaaaagggatctcttggcggttcccgcgtatttttcactgtgtttagtgcaataccgcaaacattgaataacatcctgagacccatgtaaagtgccactagtgatgctggaaatgctcccgagaagcagagaaaagtcaggacaggacaagaaaaagttgaattgcttgctacgtaacataaatggagctctacagctgcggttgtctgcttcagacagacaattcatcttgtaaacaaatttatggcattgataaatattgtagcgttctgtaactgtaaatgtattttctcttccttgtgattttctttttctttttctttttttcttctttttggagacagggtttcactctgctgcccagactggagtgcagtggcaccatcagggctcactgcagcctctacctcctgatctcgggtgatcctcctgcctcagcctcccagggagctgggattacagccacatgacaccatgcccagctgtgattttttaaataacattttctcttctctaacttgctttattctaagactgtagtgtgtagaggctgggcacagtggttcactcctgtaatcccagcactttgcaagacagagggaggcggatcacttgaggtcaggagttcgagaccagcctggccaacattacaaaaccccatatttactaaaaatacaaaaattagccaggcgtggtgtgcttgtaattccagctactctggagggctgaggcatgagaattacttgaacctaacaggcggaggttgcagtgagccaagatcatgccactagcgcactccagcctaggtgatgcagtaagactctatctcaaaataataataataataaagtaagaaagaaagaaatacagtatgtaatacttgtaacatacaaaatgcctgttaatcggctgtttatgttattgctaagtcttcaggtcaacagcaggctataagtagttaagttttcagggagtcaaaagttatattcagattttcaactctgtaggggtgaattggcaccagtagccacaacactattgaaaggtcaactataaaaagtgcagaacctagaatatgccatgttaagatttgctttggggctgggtatggtggttcatgcttgtaatcataatcccagcactttgggatgccaaggtgggtgcatcacttgagcccaggagttcgagaccagcctgggcaacaaggcaaaaccctgtctctaccaaaaatacaaaaaaaatagccaggcatggtggtgggtgcctatagtcccagatactcaggaggctgaggtaggaggatcgcttgagcccaggaggcagaggctgcagtgagctgagatcgccccactgcactccagcctaagcaacagagggagactccatctcaaaaaaaaaaaaaaagatttgcatctccatgatactaaaaatgcatttggtaaacttcacagccattcagatatgaaaccataagactttatgatatgaaaattttattttataatttcagactgaggaaagtttctccaagccagacgtgaatcccaagtttaactttgtaaaataacaaacttggctatgtagaaattaagattataagaatagccaaaaaaaaagtctcatatatcaagtcaaaagacagatttttaaagaaatttttcttggccaggtatagtggctcacgcctgtaatcccggcactttgggaggccaaggcaggcggatcacttgaggtcaggagtttcagaccagcctgaccaacatggtgaagccccgtctctactaaatacaaagaattagctgggcgtggtgatgcatgcctgtaatcccagctacttgagaggctgaggcaggaggctcgctttaacccgggaggcagaggttgcagtgagccgagatcgcgccattgcactccagcctgagcaacaagagcaaaactccatctcaaaagagaaaagaaaaaaaaaagaaaaatttttctgttgatgcataacagacgtacatagttttggggtacatgtgataatttaatacattcatataatttgtaaagatcaaatcagtgcacttgggatatccctcaccttaaatatttgtcttttctttatgttagaaacagtcaaattcttctagctattttgaaatattcaataggctattgtaaactatagtcaccctactgatctaacaaacactgtcttatttcttctatcaaattgtacatttgtacctagcaatcagcttctcttcatctccctctttctcctaccctttctggtaaaccaacaatctactgtctatcttttttttttttttttgagacggagtctcgctctgttgcccaggctggagtgcagtggcacgatcccggctcactgcaaactccacctcctgggttcacgccattctcctgcctcagcctcccgagtagctgggactacaggcgcccgccaccgagtccggctaattttttgtatttttagtagagacgggctttcaccgtggtctcaatctcttgaccttaggtgatctacctgccttggcctcccaaagtgctgggattacagttgtgagccaccgcgcccagctactgtctatctttatgagatccactttttttttgtttttgtttttgagacaaaatctcgctctgtcacccaggctgcagcgcagtggtgcgatcttggttcactgcaaccttcacctcctggattcaagcaattctcctgcctcagcctcccgagtagctgggactacaggtgctcaccaccacatccggttaaatttttgtatttttagtagagatggggttttaccatgttggccaggctggtctcgaattcctgacctcaagtgatccatccacctcggcctcccaaagtgcagggattacaggcatgagccactgcgcccgtccgagatccacttttttagctcccacataggagggagaacacgggatatttgtccaaaagacagacgttttaagtgaggaaagtatatgcaacagataaaaggcatgcattcagtctgggcaacatagcgagaccttgtctctacaaagaatgtgaaaattagctaagtgtggtgatgtgcacggatcatcccagctacatgggaggctgaagggggaggattgctggagcccaggaattcgaggctgcagtgagctatgattgcaccactgcactccagcctggacaacagagcaagaccctgtctctaggaaaaaaaaaaaaaaaaaaagcttaagggtcagaaatgagattttttttttatttgtacaaatttaagtggtacaagtgcaattttgttacatggatatattgcatcgtggggaagcctatgcctctggtgtatccattacccaaataacatacattgtgccccagaaatttaaaatgaaagactaagagagctttttgggagaattgaaatatacctccttgttttggtttattatagtaaaatacacataacacagaatttatgattttaaccattttaaagtgtacgactcaggaatattcagtactttcacgacgctgtgcaaccgttgtcaccatctcattgcaaaatgttttcatcaccccaaacagaaaccctgtccccatgggcactcactccccacctcccctccccagccccaggcatccactaatccacttcctatctctgtggacttgcctgttctgcaaactccatataaatggagcaatataatatgcgagctttggggactagctacttttatttggcataatgtgttcaaagttcatccttgtcattgcctgaaccagtgctttattcctttttatggctgaaggatattccatcattccttagagtttgaatgatcagacccattccacactcctattttgaactcatgcttatttatttatttatatatgtatttattgagacagggtctcactcttgttgctcaggctagagtgcagtggtgctatctcggctcactgcagccttcaactctctggttcaagcgattctcctgcctcagcctcccaagtagctgggattacagaagtgtgctaccatgccccgctaatttttgtattttttggtagagacagggttttgtcatgttggccaggctggtctccaactcctgacctcaagtgatcctcccgccttggcctcccaaaagtgctgtgattacaggcgtgagccactgtgcccaaataaacccatgctttttgaagcctgcaatgtgaaagtgcaaaccacgatagtcaataataattttattgtactttttaattaattaattaattttttttgagacagagtctcactctgtagcccaggctggagtgcagtggtgccacctcggctcactgcaacctccgcctcccaggttcaagcgattctcctgcctcatcctcctgagtagctgggattacaggtgcccaccaccacacccggctaatttttgtatttttgtatttttagtagagatggggtttcaccatgttggccaggctggtctccaactcctgacctcaagtgatctgccgggctcagcctccgaaagtgttgggattacaggcgtgagccagcacgcccggcttaattgcacatttaaaaataactaaaagagtataactggattgtttgtcacacaaaggataaatgcttgaggggatggagaccccattctccatgaagtgatgattacacattgcatgcctgtgtcaaaacatctcgtgtactctgtaaatataatcaaccactatgtacccacaaaaattaaaaacacaaatttaaaaataaaagaagtgcaacccacaggaatttctgggcgatgagcttcctccagtgtcttatgctgctagggccatgatcagaattgaggcttcatgttagagtctcagcacagatattacctgggctcaacatagaaaactcttagaaaatgattgggagagtcaggcgcggtggctcacgcctgtaatcccagcactttgggaggccgaggagggtggaccacctgaggtcaggagttcaagaccagcctgggcaagatggtgaaaccccatctctactaaaaatacaaaaattagctgggtgtggtggcatgagcctgtaatacaagctattcaggaggctgaggcaggagagtcgcttgagcccaggaggcagacgttgcagtgagccaagattgtgccattgcactccagcctgggctatagagcgagactccatctgaaaataaataaataaataaaatgattgagaggccaaggggggtggatcacttgagttcaggagttcaagaccagcctgggcaacatggtgaaaccctgcctctacaaaaagtaccaaaattgccactgcactccagcctgaatgacaaagtgagaccctgtctcaaaaaagagagagaaaggaagagagagagagagagaaagaaagagagaaagagagaagagagagagaaagagatagaaaaaaggaaatcaaaggaaggggagggggagggggaggggagggggagggagggggaaggggagaggggaggggaggggaggagagggaggaagggaagaagagaagggaagggcagggcttctatgtcaaactatttgtgcctcaatcaggcaaagaatataaaggaagtattaccaatttatctggagatactggcgcaatgatctttgcttctctctcttcccatttccctctcctcggtgcacttttcaagaaagacgaagacaaaatttatgtaaaatattctcatttctcaaaagcacttcttggatttgtttcgcaaatgtacaagaccctttcccactggctgagagaggtagttacccgaatctaggtagaaaatgattatataaaattttataagtaaaattatttttgcaacataaacactgaaaagatattcagcgaaacaatgtcatgtttcaagaaaagaccaagctacatctacatgtcctgagatgagaacttcctatatatataactacctaaaaagaatcaaatgcagaaccatgtacctgaaacactatcatttgcattttaaaggggggtgaggtacagccacgcacactcacctatacgcattcacagatatttccagaatcttgaagtacgtctccaaaaacacattcaaaactggcaatctttttttgtctgtttgaagagttttaaccatgtatattaattccctttttaaaacacagcatgagacagttaattttttttttttttttcagaacagcatcaccatagctacaaaatgacataaaataaaatacaaagagagccgggcgtggtatgccccgcctgtagtcctggctactccggaggctgaggcggaaggaacgcttgagcccgggagttcaaggatatagagaaacatgttcccgcctctgagtaccactgtattccagcgtggttgacatagggagaccccacctcctaagaaaaaaaaaaaaaaaaaaaacttagaaaaacaattaacagcaatggctctgacctaaattttttaaaaaactaatgctttataacttgaataaataaagaaatgtgccttattatttctgggaaaaagaacagaatattggaggccaggcacagtggctcatgcctataatcccagcgctttggggggcccaggcaagaggatcacataaggccaggagttcaagaccagcctgggcaacatagcaagaccctgtctctacaaaaaaaaaaaaaaaaaaaaaaattgtaaaaattagctgaatgtggtggtgcctgcctgtggtcccagctactccagaggctgaggtgggaggatcacttgagtctaggatttcaaggctgcagttagctatgattgattgtatcgttgcacttcagcctgggtgacagagccagatcttgtctcaaaaaaaaaaaaaaaaaacttcaaaattatacctaaaaggtatagaaaaattattctgaagttcatctggcatagggtttctcaacctcagggatatggacactgaggcatggataactcttcgttgtggaaggctgtactgcacattgtagaatgttgtgtgtgtgtgtgtgtgtgtgtgtgtccgagtctggctctgtcacccaggctggactatagtggcacaatctcagctcactgcaacctccacctcccaagttcaagtgattctcctgcctcagtctcccgagaagctgggattacaggtgcccaccaccgtgtccggctaattttgttgtgtttttagtagagacagagtttcaccatgttggccaggctggtctcgaactcctgacctcaagtgaccaggagcatggactcacatcccagttctgctgctagaccaagatgtttggccaagaccaagtagagtacctcaaccactagctctttctccagaaaaactctcttgtggctgtgaactgcctccatcaacccaatcaccaatctcagaccctggatgtccaccacaagacccgctgcctactctgccctctgaacacctctctacctgcttccttcactttcagttctttcttatttatttatttatttttgagattaaatcttgctatgttgcccaggctggggtgcagtggcacgttctcggctcactgcaacctcctcctcccaggttcaagcatttctcctaactcagcctcccgagtagctgggactacaagcatgtgccaccacacccagctaatttttatatttttagtcgagatgaggttttaccatgttggccaggctggtcttgaactcctgacctcgttatctgcctgcctcggcctcccaaagtgctaggattgcaggtgtgagccactgcacacggccctccttttcagttttttaaagacagggtctcactctgtcacccaggctggagtacagtggcacaagctcagcccacagcaacctccgcctccgaggttcgaacgattctcctgcctcaccttcccaagtagctaggactacaggtgtgcaccaccacacccagctaatttttgtatttttaatagagacgagttttcaccatgttggccacactggtcttgaccacctgacctcaggtgatccacccacctcagcctcccgaagtgctaggattataggcgtgagccactgcacgcagccccatctgacttcttaagtcaccttgccttattacccatcagaggaagacatttctactcccttccctctctgagatgctctatttgcgttaaaacaatcgtaacagtccatgctttcattatgtgcagtagctcaaaactagaagcaacccagatttttatcaacaggtgaatggataaaccaacagtgatataaccatgccatggatcactgcttcacaataaaaaggaaggaactattgatacatccaacaatagggatgtatctcaaaataattctgctgacttagaagtcaggccataaaaaaatgcttggtacatgattccagaaaatcttagaaattctgctgacttagaagaagccaggccaaaaaaaaaaaaaaaaatgcatggtacatgattccatttccatgcctgtaatcccagcactttgggaggccaaggcgggtggatcacaaggtcaggagatcaagaccatcctggccaacatggtgaaaccccgtctttactaaaacttcaaaaattagctaggtgtagtggcaggcacctgtaatcccagctactcaggaggctgaggcagtagaatcgcttgaacctgggaggtagaggttgcagtgagccaagatcaagccactaaactccagcctgggtgacagagcgagactccatctcaaaaaaataaataaataaaactcatccataatgacagacagcaaatcacgagctgccaggagaggggaaagagggaggggttccaaagaagcatgtagaaactttcagctgggcacagtggctcacgcctgtaatcccagcactttgggaggcagaggtgggcagatcacttgaggtcaggagttcgagaccagcctggccaaaatggtgaaccccgtctgtactaaaaaaaaaaaaaaaaatagtggggcatggtcgtgggtgcctgtaatcccagctacttgggaggctgaggcaggaaaatcacttgaacccaggaggcagaggtcgtaatgagccgacatcacaccattgcactccagcctgggtgacagagtgagactccatcaaaaagaaaaagaaaaaaagaaagaaagaagaaaagagaagaaaagagaaaagatcaaactactctataatgacagacagcaaatcactaggtgccaggagagggaaagagggaggggttccaaaggagcatgtagaaactttcagctgggctcaatagctcatgcctgtaatcccagcactttgggaggcagaggtgagcagatcacttgaggccagcagttcgagaccagcctggccaaaatggtgaaaccccgtctctactaaaaatacaaaaaaaaaaaaaaaaaaaaaattggcggggcgtggtggtgggtgcctgtaattccagctactcaggaggctgaggcaagagaatcatttaaacccaggaggcagaggttgtaatgagccaagattacaccattgcactccagcctgggtgacagagcgagactctgtctcaaaaaaaaaaaaaagaaagaaagaaagaaaagaaactttcagaggtgatggatgtgttgctgtcctgatggtggtggtgttttcacaggtgtagacatacagcaaagtgtatcatattgtacaccttaaatatgagtggtttattgtatgtcaattacactttaataaagttgttttttaagcaataaaagttgcattttacaagtttcaactggcgatttttttgttagtttgtttgagacagggtctggttctgttgcccagcctggagtgcagtggtgcaatcatagctcacagcagccttgaccgcttgggttcaagcaatcctcccacctcagccttccgagtagctgggattgcaggtgctcgtcaccacacccggctaattattttatttcttgtagagacaaggttttgccatgttatgttgcccaggctggtcttgaactcctgggctcaataaatccatccacctcagcctcctaaagtgctggggttacaggtgtgagccactttccccggcctcctagactgacgatcttttgatggtgtttgctcttccccacactctgaagtttaaggacacaatcaatgagaccagtctctacagcagaacacgttggtgctacctgctattctgttgtggagttggtggttgggaatttcctattgagtagctctcattcaaggggttataattccgtaaaagctgcccccatcctatctgatgtaaaaaccttcagagttgaaaccatccatcactagttacaaagtagctcaacaagaatccaagaggcaggccggatgtgctggctcaggcctgtaatcccagcactttgggaggccaaggcaggcggatcaggaggtcaggagatcaagaccatcctggctaacacagtgaaaccccgtctctactgaaaatacaaaaaaagtagccaggcgtggtggcatgtgccttgggaggctgaggcaggagaatcgcttgaacccgggaggcagaggctgcagtgaaccgagatcgtgccactgcactccagcctgggtgacagagcgagactccatctcaaaaaaaaaaaaaaaatcgaagaggcagtaaacatcccgagcaaaggagaccacgacgaggtaagagattgtaactctgcaccagacatttcacaggactgaattaagcgtcacggatttgtggtgaaaagtgagcataacaaatttcatccagccaatgaacctctccagacaggaatgcaaccagcttttaaagggacagccgcaagcaatatgaaggtgtttccagctattaaggatgcacctggccagcattattctaagtgaagtaactcaggaatggaaaggcgaatatcctatgttctcattgataagtgggagctaagttaggaggatgcaaaggcataagagtgatataatggccaggcgcggtggctcatgcctataatcccaacactttgggaggccgaggtgggcggatcacgagatcatgagttcgagaccagcctggccaacatggtgaaaccccgtctctactaaaaatacaaaaattagccaggcgtggtgctgcacacctgtaatcccagccaccagagaggctgaagcaggagaatcgcttgaaaccagagggcggaggttgcagtgagccgagaccgcaccactgcactccagcctgggcaagaagagcaaaactctgtctttaaaaaaaaaaaaaaaaaaaaaagtgatataatggactttggggacttgggcagggaaaattggggggagaaggatagaagactacatattaggtacagtgtacactgcttgggtgacaggtgcaccaaaagctcagaaattgccactaaaaagcttatccatgtaaccaaaaaccacctgcaccctcaaaactactgaaataaaaataaaaatttaagaaataaataaatataccttcttcctaggaaaataaataaataatgcaccagccaggctcagtggctcacgcctataatcccgacactttgagaggctgaggcaggtggatcacctgaggtcaggtgttcaagaccagcctggccaatgtggtgaaaccccgtctctactaaaaatacagcagttagccaggcatggtggtgcacgcctgtaatcccagctagtccagaggctgaggcaggagaatcacttgaacctgggaggcagaggttgcagtgagctgagctcacgccattgcactccagcctgggtgacagagcgagactctgtctcaataataataatgataataataataataataataatgcacgtatccaggtgcagtgactcacacctgtaatccaccactttggaaagccaaggtgagagtatctctagaggccaggagttcaagacccacttgggcaacatagcaagaccccatctcttaaagatttcaaattggccagtcatgatggtatatccctatagtcccagcattttggaaggctgaggtaagaggatgacttgagcccaggaggtcgaggctgcagtgagcaatgatcataccactgcactccagcctgggtgacagagtgagaccctgtctctaaaaaaattaataaataaataaaataaggagtcagagagagttttgacagaagagaataaggtcatgtaaagatagttgcagagactggagtgatttagccacaaacaaaagaatgccaatagccaccagaagtgagaagaagcaagaaatgtgtgcgtgtctgtgtgtatgtgtgtgtgtgtgtgtgtgtgtattttctttttttgtttgagacagactttcactttagtcacccaggctggagtgcaatggcgtgacctcggctcactgcaacctccgcctcctgggttcaagcgattctcctgactcagcctcctgagtagctgggattacaggcgcacaccacaacacctggctacttttatttttgggagacgggatttcaccatgttggtcaggctagtctcgaactcctgacctcagatgatccatccaccttggcctctcaaagccatgaggcaccgcacccagctgtatgtgtgtattttttaattgatgtgaaattcccataaaataagatcgtggatcttaaagtgaataacttagtggtattttgtacatttacaatgttgtacaaccaccacctctatcaagttcctgaacattttcatcaccttcaaagggaaacctcacatatattaagtagctgttccccattccaccccctccgtgacaactagtaatttactttctgtctctgtgaatttccctatgccagatttttttttttttttttgagatggagtttcactcttattgcccaggctggagtgcaggggtatgatctcggttcactgcaacctccgcctctcgagttcaagtgattctcctgcctcagcctcccaactagcttggattacaggcatgtgccaccacgcctggctaagttttgtatttttagtagagacggggtttcatcatgttggccaggctggtctcgaactcctgacttcaagtgatctgcccgcctcggactccccgagtgctggcattacaggtgtgagccaccgcaactggccagagtttccttcctatttatttatttattttatttttgagatggagttttgcttttgttgcccaggctggagtacagtgacgtggtctcggctcactgcaacctccgcctcccgaattcaagtgattcttctgcctcagcctcccaagtagctgggattacaagtgcccgccaccatgcccagctaatttttgtattttgagtagagacagggtttcaccacattggccaggctggtctcgaactcctgacctcaagtgatccacctgcctcggccttccaagtgctgggattacaggcatgagccaccgcgcctggccgaatgtccttcctttttaaggctgaatcctatcccaccctacggagggaccacattgtttatccattcgtctcttgctgggcacttgggtgccttctgtctttggctgttatgaatcacactgctgtggacatgggtgtacaagtgtctctttgagtccctgctttcaaatctcgtgcgtgtatacccagaagcagaatttctaggtcatatggtaattctatgtttaatttctttttttttcttttattttttttgagactgtgtctcattctgtcgcccaggctggagtgcaatggcgtgatctcagctcactgcaacctccacctcccaggctcaagcgattctcgtgcctcagcctcctgagtggctaagattacaagggcccgccaccccacctagctaatttttttgtattttgagtagagacagggtttcaccacattgcccaggctggtcttgactcaggcaatcttccggcctcggcctcccaaagtgctgggattacagatgtgagccaccgtgcccggcctgattctatgtttaatttctttaaggaaccagtgtacccttttccatagcagcggcaccattttatattcccaccatcactgcaccggaatttcgattcttccccatccttgccttgtggcgtacacatcccgcaccccaacaccttcttggtgtctgcttccagagcaccccactgggtgaccgtcaagctccacagctgagtttctgaccactgtgcttcccagattccctcctgaatgctccatcttccgaatgcctttgggccacagatggcccgggaaggaggctttctgctagcataagtcactgtagtacagtgtacatagcagatatccaggtcctgggagcatcctttccctagttctttctttttttttttttttcctgagatggattccactcttgccacccaggctagagtgcagtggcgtgatctctgctcaccacaacctccgcctcctgggttcaagcgattctcccacctcagcctcccaagtaactgggattacaggcatgcgccaccatgcccagctaattttttttttagtatttttttttttagtagagacggagtttcttcaagttggtcaggctggtcttgaactcccgaccttaggtgatctgcccgccttggcttcccaaagtgctgggattacaggcatgagccaacgcgcccagccttctttccctaattcttggtcaaccatccccactcactttccacaacctgactcaagccctgccattcttctcagctcccaagacctcccacccctgcctgagacacaccagctggtggccttcctcgctcccaagaggaagagcagtcatgcggtccattacccgccttcccagtctttacccggaactccatccgcacccacctcatggccttccttcctccctgttcccggctgtgatcagcccttcccctctatcctgggcctgtccctttgcaacttccaggttggcatccaccagccattctgtctctcctgagcctctctgctccattcccctggctgtggactcagccttctcagatcccagctcttccacatcccggctgtgtgagaggcagatgcacctcttctgtaaaatgaggaataaaaaaagaaatatgggaccaggcacagtgccttatgcgttaagaggccaaggcgggaggattgcttgagcccaggagtttgaaaccagcctgggcaacatagtgaaagcccgtctctactaaaaatataaaaactagctggccatggtagcgggtgcctgtaatcccagctactcgggaggctgaggcaggagaatcgtttgaacccaggaggcggaggttgcagtgagctgagatcacaccactgcactccagcctggtgacagagcgagactccatctcaaaaaaaaaaaagaataagaataaataaaattagctgggcatggtggcacatgcctatagtcccagctactcaggaggctgaggcaggaggatcgcttgagcccaggggtttaaggatgcagtgagtcacgatcatgccactgcactgcagcctgggagacagagtgagaccccatctcaataacaacaacatacaaacaaaaatgatgcctccgtatccttgtcacaaacaattggtgctattttcttagtgcataattaacaaaattcacccatgcttccagttcaccagatcagtggtgcctgtaccatcccacacagaagaaaatcttatttattttctatcttgattttttttttttaagatggagtctcactctgtcacccaggctggagtgcagtggcatgatctcagctcactgcgacctctgcctcccgggttcaagcgattctccttccatagcctcccaagtatctggaaccaggcaagtgccaccacacctagctaatttttgtatttttattagagacagggtttcaccatgttggccaggctggtcttagaactcccgacctcaaataatctgctcacctcggcctcccaaagtgctaggattacaggcgtgagccaccacaacagacctatttttaaattgggtgtaatttacatgcaataagtttatgtaaactgtaagcagaaggtttgatgagccttgatagcatacacaccttttaaccatgacccctatcaagatatagaatatttctaaaaatagtactaccattccatccagcaatcccactactgggtatctacccaaaggaaaagaaatcaatatatcaaaaagatacttgcacccatatgtttattgcagcaccattcacaatagcaaagacatggaatcaacctaagtgtccatcaatggatgactgaataaagaaaatgtggtatacatacaccatagaatactgttcagccataaatagtatagtattctttgcaaaataatgagatcatgtcttttgcaggttcatggatggaactgtaggccattctctctctctctttctttcttttttttttttgagacggagtctggctctgtctcccaggctggagtgcagtggcacaatctcggttcactgcaacctccgcctccgggttcaagagattctcctgctcagcctcctgagtagctgggattacaggcacccgccaccacacctggctaaattttgtatttttagtagagacggggtttcaccatgttggtcagactggtctctaagtcctgacctcatgatctgcccacctcagcctccccgagtgctgggattacaggcgtgagccaccgcgcccggccctggaggccattctcttatgtgaaacaagccagacacagacagacaaatatcacatgttcttacttataagtgggagctaaacaatgtgtacacctggacgtagagactggggtgattgacaatagagactcaaaagggtggcgcaaggcggtgggtgatgagaaaatacataatgtatatgatgtacattatttggtaacggatatcctaaaagccctgactttaccactaggagcacaactatgcatatcacaaaatggcaaggctgaacgtggtgactcaggcctgtaatcccagcacttcaggaggccgaggcaggctgatggcttgagatcagaagttggagaccagcctgggcgagtccccatctctacaaaaactacaaaacttagccaggcgtggtggcacatggctgtgttccacctactcaggaggctgaggttgggaggatcgcttgaacccaggaggtggagattgcagggagacaagatggcaccactgcactccagcctgggtgatagagtgagatcctgtctcagaatcaaaaatagcacttgtaccccatacatttacatatattttaaaaaaacgctatatgtgtaaacttgttttttaaaaagatgtgaaatattggccaggcacagtggctcacgcctgtaatcctaccactttgggaggctgagagaggtggatcacctgaggtcaggagtttgataccagcctagccaacatggtgaaacccggtctctactaaaaatacaaaaaagctagccaggcagcagctgtaaactcaggaggctgaggcaggagaatcgcttgaacctgggaggtggaggttgcagagagccgagatcgctccactgcactccagcctgggcgacagagcaagactctgcttcaaaaataaataataaaaaaaaagatgcggagtatttccattaccccaaaaatcttcctcatgtctcttccctgtctgttggggtccccaacatccagaggtaactgtgattctccatcatgttaaactcctttgatctcttagaggactttatagaaatggaatcttgtggtctggtacgggttgagctccctttgctcaacataacgtcggtagcattcagcagtattgctgaggggacagagggtcatgttcacagcagcactattcacaatagccaagaggtaaaagcaacccaagtgtccatcaatagatgaataggtaaacacaatgtggtatatccatacagtggaaaattatttagccattaaaaggaaggaaatcccgacacatggtaaaacatggatgaaccttgaggacattatgctcaatgaaaagagcaattagccagtctcaacaaatcctgtcttttttttttttcatagactgagtctcactctgtcacccaggctggagtgcaatggcgccatctcggctcactgcaacctctgcctcccgggttcaagtgattctcctgcctcagcctcccgagtagctgggattacaggtgcatgccaccacgcccagctaatttttgtatttttagtagagacggggtttcaccatcttggccaggctggtctccaactcctgacctcgtgatccacccgccttggcctcccaaagtgctgagattacaggcgtgagccactgcgcccggccggtcatggctttttattgctgtgttcacagctctgtcatctttctggcgcattaggcttcctgcaaggcttggacttccagccttggctcctctgctccagtgctgtggacacggaccaaggagtgctctcctaggaatgatcatgtctcaccagtgccctggtgaagaaccttgcgcagagccatccatgaccaactgtggcatttcccgaggtgctgggcatggattactgttagtaagataagtgactcgaggtggcataaaggcgtgatgatgtcctttcacacagcgaggacgtgattgcctcttaaattctctcggttgactctgggaatacgtctctatttggtgttactccggcttttcttgttttgttgtggtaaaaaacatataaaatttaccatcctaactttttttttttttgagatggagtctcactctgtcacccaggttgcagtgcagtgcacgatctcagctcactgcaacctcccgaattcaagaatttctcctgcctcagcctcctgagtagctgggattacaggaatctgccaccatgccttgctaatttttgtatttttagtagagacgggatttcaccatgttggccaggctggtattgaactcctgacctcaaatgatcctcctgcctcagcctcccaaactgctgggatcacaggtgcccaccaccacagccagttattttttgtatatttagtagaggcagggtttcaccatgttggccaggctggtctcaaactcctgacctcaagtgatccacccacctcagcctcccaaagtgctgggattacagcaggcatgagccacagcacccggccatcctaaccatcttttttttttttttttttttgagttggagtcttgctctgtcacccagtctggagtgcagtggtgcgatctcagctcactgcaacctctacctcccgggttcaagcgattctcctccctcagcttcccaagtagctgggactacaggtgtgcaccaccatgcccagctaatttttgtattttttagtagacatggggtttcactacatgttgcccaggctggtctcgagctcctgacctcaggtgatctgcctgcctcggcctcccaaagtactgagattatagtcatgagcaccacgcccagccatcctaatcattgtgtgtgtgtttgtgtgtatgtgtgtgtgacaaagttttgcccttgttgcccaggctggagtgccatggcgcgatcttggctcgctgcaacctccacctcccgggttcaagggattctcctgcgtctgcctcctgagtagctaggattacaggcacccgccaccatgcccagctattttttgtatttttagtagagacaggttttcaccatgttggccaggctggtctcgatctcctgacatcaggtgatccacacaccttggcctcccaaagtgctgggattataggtgtgaggcaccgcgcccggccatcctgaccatttttaagtgcatagctgagtggcattgaatacattcacctggttgagtgaccatcaccaccatccatctccagaactttcacaccttcccaaactgaaactcttcccatgaaacattcactccccacccccactccccagcccctggcaccctctatcctactttctctctctatgaatctgacaactctaggaatctcatatgagtgggatgatacaggatttgtcctttggagactggctaatttcactgagctatgacgtcctcaagatttatccacattgtagcatgtgtcagaatttctttcttttttatggctaaataatattccactgtatggatataccacgttgtttttatccattcatctgttgatggacacttgggttgcttccacctcttggctgttgtgaatagtgctgctatgaacatgggtgtgcaaatatctctttgatagtctaatttaaactccttgggatatatacacataagtgggattgctggatcataggatgattctatttacttttttgaggaaacgccatactgttttgcacagtggctgcaccattttgcattcccaccaataatgggaatttccaacttcttcacatcttcccccacacttcttattttctaatatatatcatatatatataatcatatatacagtgttattatattagcatattcgatcatatatagtgttattagtcacatagattatatatatattttttatttgtgtaaatttactgggtacaagtgctatctttgtttttgttttcatttttattttgagatggagtctcactctgtcacccaggctggagtgcagtggcatgatctcgactgactgcaacctccacatccagggttcaagcaatcctcccaacctcagcaccacgagtagctaggattgcaggcatgtgccaccatgcctggctaattttgtatttttagtagagacagggtttcaccatgttggccaggctggtctcgaactcctgacctcaggtgatctgcctgccttagcctcccaaagtgctgggattacaggcatgagccatcatgcttggcctcctttttgtttttgagacaaggtctggttctatcgctcagggtggagtgcagtggcgtgatctcagctccctgcaacctccgccttctgggttcaagtgatcctcccaaccttggcctcctgactagctgggacataggcatgtgccaccaagcctggctaagttttgtattttttgtaaagaaggggtcccgctatgttgcccaggctagtcttgaactcctgagctctgatatataccatacatatatgatatataatatatatcagcatatatatttacgaggatatatatatgcatgtatatgtgtgtgtgaggcaatatatcattgcatttccctaatgactaatgatgtcgagcatctttttcatgtccttattggccatttatacatcttctttggagaaatgtctattcaagtcctttgcccagtttttagttggattattggatttttgttgttgaattgcagaaggtatccttatgtattatggataccaacccctcatcaggtatatatttgcgaatgttttctctcattctgtaggttgccttttcgctttgttgattgtgtcctttgacacacaaaaaattttaagtttgaagtaatcccatttgtctatttttggcttttattgcccatacttttgtgtcatattctttttttaattaattaatttattttttgagacagggtctcactctgtcgcccaggctggagtgcagtggtgcagtctcgtctcactgcaacctctgcctcctggattcaagcaattctcctgcctcagcctcccaagtagctgggactacaggcatacgccaccacgctcagctaatttttttgtatttttagtagagacggggtttcacgaactcctggcctcaagtgatccacccaccttggcctcccagagtgctgggattacaggcgtgagccaccatgcccagccattttgtgtcatattcaataaaccattgcagaagtgaacagaacaaacttttttcagcctcctaacttttctatgtgctgctcttctccctaaaaggtctcttctttggcccagctaactcttatttgtctattaatgctaacttcttgtgggaagacttccctgactatccctgggcccaaaccttgggtgtacacccagaggaatagaaatcattctatcataaagatacacggaagtgtatgttcattatagcactattcacgatagcaaagacatggaatcaacataaatgcccatcaacgatagactggataaagaaaatatggtatatggccgggcacggtggctcatgcctataatcctagcactttgagaggccaagacgggcggatcacctgaggtcaggagtttgagacaagcctggccaacatggtaaaaccctgtctctactaaaaatacaaaaattagccaggcatggtggtgggcacctgtaatcccagctgctcaggaggctgaggtgagataatcgcttgaacctgggaggtggatgttgcagtgagctgagatcacaccattgcactctagcctgggcgacaaagtgagactgtgtctcaaaaaaaaaaaaaaaaatcataataatccatataacaaactcccatgacacaagtttacctatataacgaatctgcacattttcccctgaacttaaaagttaattttttttttttgagatggagtctcgttctgtcacccaggctggagtgcggtggtggggtctcgactcactgcaagctccgcctcccgggtttaagcgattttcctgcctcagcctcccaagtagctgagattacaggcacctgccgctatgcccggctaattttttgtatttttagtagagacgcggtttcaccatgttggccaggctagtctcaaacccctgacctcgtgatccacccgcctcggcctcccaaagcgctgggattgcaggcgtgagccaccgcacccggccaaaagttaaaattttaaaaaaagaaaaacaacagccaggggttatgtctcgagaccatccacagggggataaaaaaatgtcttctctaaattgcaacaaaaaatagacaatcatgaacaaccccagtcataaaatcatcatctccgtgatcaccaccagaccatcagcagccaaccaaccccctaaaacagctccggctttacagttcttgggtctgtctgagagagacctcaatgcatgcatgttccaaaccaagagaacccgaaggtcacttctgaagtcacatcctctatccacccgccaggcaaggccaaaacaaacaggagctgataagccggctctattctgagtagagaagggtcagcttatcacccagccggccctgccctaaatggaaagacacgtccctctccttggcccagagacgggaatgtgttcaacagcacagaaaaataaaaaaatgaaagaaagaaataaaatgactccaagtagagttcattccgttagaatggagttatccagcctcagcactgtggatacttgggactgcataattctttgcatagggaccattctatgtgcatgggaggacattgaatggcaccccggcctctaccatcccgattccgatagcagctacaccccagttgtgacagagtctcgctctgtctccaggctggagtgcagtggtgcgatctcggctcactgcaacctccacctcctaggttcaagtgattctcctgcctcagcctcccgagtagctgggattacaggcacgtgccaccatgcccagctcgagagcagcctggccaacacggtgaaaccccgcctctactaaaaatacaaaagttatctgggcatggtggcgggcgccttcatcccagctacttggaggctgacgaactagagattcgtcatacttttttgacttttacccattaatagatcttgctcatttttcaggaaaagcatagaaaacaagacttagagtgttacttttaaaaatggtatattattattattattattattattatgtaaattactttttttgagacagggtcttgctcttttgcccaggctggagtacagtggtgccatctcggctcactgcaacctccgcctcctgggctcaaatgattctcctgcctcaccctcccaagtagctgggatgacaggcgcccgccaccatgcccagataacttttgtatttttagtagaggcggggtttcaccgtgttggccaggctgctctcgagctgggcatggtggcacgtgcctgtaatcccagctactcgggagggtgaggcaggagaatcatttgagcccaggaggcggaggttgcagtgagccgagatggcaccactgtactccagcctgggcaaaagagcaagaccctgtctcaaaaaaagtaatttacataataataataataataataataatataccattttttaaaagtaacactctaagtcttgttttctatgcaatgacatggaaaaatgagcaagatctattaatgggttaaaagtgcaaaaaagtataaagcgtgatcccattttcacaaaatgtgggtattatatatttatttgggtgtagataaagaacataaggcaatacatatgtagttgtctgtgtgtgtgtttatagcattctaggaggatatacaaatattcatagtggttgagatcactacaggagacttccacgttctacatttttgtgtcatttctttttaaaatgtgtattgctaaggctgggcatggtggcttgcacctgtaatcctaacgcttggggtggtcgaggtgggcagatcacgtgaggccaggagtttgagaccagcctggccaacatggtgaaaccctaactctactaacaatacagaaattagccgggtgtggtggcaggtgcctgtaatcccaactactcgcgaggctgaggcatgagaatcacttgaacccaggaggcggaggttgcggtgagccgagatcacaccactgcactccagcctgggcgacagagcgagactctgtctcaaaatatgtgtgtgtgtgtgtgtgtgtgtgtgtgtgtgtgtataatgtgtatatatataatgtatatatctatatagtattgcttttttcaatacagcaattttttaaatttttacttgtggcaaatcacacataacataaaatgtatcattgtaactattattcagtgcacagttcagtggcactaagtgcattcacatggctgtccagccatcaccactatcatctccagaacgttctcatcttcccaaactgaaactctgtctccatgagacactcactccccatcccccctccccagcccctggcacccactgtcctactttctatctccatgaatctgatgactctagggacctcatgtaagtggaggaaggggatatttgaaaaacctcagaatcatcattagtgatttgcgggttccagctatacacgggagatctcagagaggcaaactaatcctatggaataaaggagtgcccctttccatcttctagagagatgggaaccagggatgaagattccaagaatcccgacagaggccagaaacaatggtcatgttcctgaattgattgtttcttgctttttgggaagggaggatgaaagaaaccaggcccaccatgccccagagcccaggccaatttaggataggagtgcagcttccacatggaatcttggcacaatctggacatcctggggtccaaaccctctttgtgggcagggaatcagaggcactgtcccagttggcatggggttggggtgctctcgagcagccagagagacctggacaaggtttcctggccaggcatggtgactcacacctgtaatcccagcactttgggaggccgaggcgggtggatgacttgaggtcaggagttcgagaccagcctggccaacatagtgaaaccccatctctactaaaaatacaaaacattaaccgagtgtggtggtgggcgcctgtaatcccagctacccaagaggctgaggcagaagcattgcttgagcccaggaggtggaggttgcagtgagctgagatcgcgccactgcactccagcctgggtgacaaagtgagactccatcacacacacacacacacacacacaaaaaggttttctctctctgagcctcagtttcaacatctgtaaaatggcagtatcctaacagggcccacaaaaccacaatctataaaagactgataattggctttcaccaaaattcaaactcatgctattcaaaagataccagtgggaaaatgaaaaagcaagcacagatcgagaaaaaatatttgcaaagcatgtatccccacaaagggcatggatattaaacacgtaaagaactcttacaactcaacagtaagaggacaaatctggccaggcgtggtgggtcacgtctgtaatcccagcacttcaggaggcagaggtgggaggaacgttttagctcaggggttcaagaccagccaggacaacataacaagacctcatctctacctcgctctgtctccaggctggagtgcagtggtgtgaacttggctcaccacaacctccacctcctgggttcaagcaattctcctaacatttaaaaaaaaattgtttttaattagccaggtgtagtagtgcatgcctgtagtgccagctactcagaaggctgaggcagggggatcccttgagcccaggaggtcgaggctgccatgagctgtgattgtgccactgcactccagcctaggggacagagcaagaccctgtctcaaaaagaagaggaagaagaagaggaagagggacaggaacaggaacaggaagaggaggaggaggaggagaacaaatctaatattgttgacaatctagttttttttaacgtgcaaaagatttgaacaggcacttccccaacgaagatatagagatggcaaataaacacccgaaaaggtgtttaccatcattattcattaagaaaaaacaaattaaacccacaattgagataccactataagcctactagaatggctaagactaaaaataacactatcaactgctgtcaaggatgtggagaaactggaactcccatacacagctaaggggaatgtacaatgatacaaccactttggaagcactttggtggtttcttgagaagttacacacacacttactgtacaaatcaaccattccaatcttgattgtcgacctatgacaggtaaaagtatatatccatacaaagatttgcaggtgaatactcatagctccatttatattcaccaacaaataaaagcaaatccaatgtccatcaacaggagaataaataaacatactatggtatatttgaacaatggaacattattacttaaccattaaaaaagagaataggccaggcatggtggctcatgcctgtaatcgcagcactttgggaggccaaggcgggcagatcacttgaggtcaggagttcaagaccagcctgttcaacatagtgaaaccctgtctctattaaagatacaaaaattagccagacttggtggcatgcccttagtcccagctactcaggaggctgaggcagaagaattgcttaaacctgggaggtggaggttgcagtgagccaagatcgtgccactgcactccagcccgggcaacacagtgagaccctgcttcaaaaaatatgtatatataaattaaaaaaagagaacaaactatggacaccaacaacagcatggataaatctcaaaatcactatgttgagtgagcatactgtatgctcagacaaaaattagcacatgcaccttgattctatttatatgaaatactagaaaatgcaggctgaaatgtaatggcacgatcttggctcactatcacctccgcctcccgggttcaagcgattctcttgcctcagcctcttgagtacctgggattacaggcatgcaccaccacaactggctaatttttgtatctttagtagagacgggacttcaccatgttgcccaggctggtctcaaacccctgaactcaggtgatccgcccgcctcggcctcccagagtgctgggattacaggcatgagccaccgctcccagcctggttcacttctctccaaatccttcatgtcccacctgtaccaacctgaggcagctgcctcctccttgatggcctagtgtccactcctgccccctagagtccattctcatcactacagccacggaattctctttgttttaagtacataataatccatggggtgctcctcccattactgggctgggaaagccaggtcctggagttggcgctagaaaatggtccctgccctcttggaggttacggttgaatcaaacaactacacaaataaatatactcttacaaatggaagtctgtaccattcactggtacattcgaccctatcatactggtgcttctttctaaaactcagctggcactccagttctcttttgagtagaaaataaaaaagaaaacaatttttaaataaagtaaaacacagctggtctttcattcctctgccactgtcagctatttcaaccaaaaagaacctctcctcctggaaaactcttattcacccgtcaaaacccagcttaaagtttacttcccttgacccacttttctactacatctcagaaaatgagatcttcctttcactgtgatactatggaagtcaataaacctctgaagcattcaactcaagaagtcctagagaaataagctgagaaaggaatttgtcctgggtaacaaaagtggaactttatccattaaaacacataaaaacgctagaataaagaaaaaaatttgggaaatagaatttgttttctttttctgtttcttgaataaactctagccagtttattcaagaaacagaaaaagaaaacaaattcaatttgccacaacagaaaggtggctataaacgcagatttagagttttttaaaataaaagagtatgatatacaactctatgctgaaatttaaaaaatctcaatgaaactgagctttctgtaaacatgtaaattatcaaaattaattcaagaaggaatagaggtactgaatgcataactaaataatgacgaaagaaactaaagatattatgaaaaataacctccaaaaaggtcaatcccaaatggtttatggaatcatttaaccttcaaaagttcaagaaatagataaagatttctaaggtttatggactcattaaacttcaaaagttcaagaaatagataaagattcctaaaatagatgagaaatttcctaatcattctataaacagctcaatcctggtacaaaacctgactatctaccaaaaaatttttaagaccaagttctctgtctctctttctgtctctctctctcatagatacacacacacacacacacacacacacacacacacacgcagctaattaaataaaactaggttcactaactctttttttttgaaacgggatctcactctgctgctgaggctggagtgcagtggttcgatcgtagctcatagcagcctccacctcccgggctcaagcgatcctcccacatcagcctcccaagtaactgggactacgggcacacaccaccatgcccggctaaggttcacagactcttttcgataattctgaaaacctaaatgctctgggcacaacaaatatttggcataaatttggcaccaaaactaagttggtaaccaacttcactaaaagtgatattgtctatttatattatttatgacacctatatgaatattcatggattttctctgctgaaatattaatgtgcttgattatgaggtccccctatatacaccataagtggtgttaggtagtaacacactatatgcactctattgaatatatgtgtgtattaaaataataaatgatatataattaataaattataataaataattaagaaaaataattaacaaaaattattaataaataataaaactacatccgagtttatggccacctttctgttgtttagataattgaatttttctttttctgtttcttgaatagactttatttaagaccctagaggtctataccaggaacacatgtatgaatcaatgtaggcagcaatgtgttggaactggctcagaatgggtcacactggccaatgggcagcatctcttcccaacctacccttagtgccatcatcttgggtagcttgaatcacccacagtggaagtatttacaccactggaattggcaaatgctacaaatttggaactctctttttttccattggccagcaccttcttaacactgggaaatcttttaaataaaactcactgtctgtaggtaaaagaaaaaaaaatagtgcttgttcatctccaaagaagtcaaacagttgttagataaaatctcttttttttttttttttgagatgaagtctcactctgttgcccaggctggagtgtaatggtaccatctcggctcactgcaaactccaccttctggattcaagcgattcttgtgcctcaacctcccaagtagctgggattacaggcgcgtgctaccacgcctggctaatttttttttttttttagtacagacagggttttgccatgttggccaggctggtctcaaactcctgaccttatgatccgcccacctcggcctcccaaagtgctgagattataggcatgagccacactgctcagccattgtttgataaaatctttatccatttctgatataaaagtttagtaaattagtagtgggaggatatttttattgtctagtgggggcagtatagcccaggtaaacaccggagttctattgcctgtgtttaaattctgattcttccactttctggtttttcatgggttctctgagcctatgctttctcctatgcacatgaaataatattagtacctacctctgaaggctatctgcaggaattaagtgaaataatttctgtaaagtgcttagaaaaatgcctgacgaatattaatagtaagaacctagtaaatggtagctagtgctatgaattgttaaatataggaaaagattatattttctggataataagtggttctacctcaatcactgcatcatgtttaacaaggagtccgtgtgcagtggctcatgcctataatcccagtacgttgggaggctgaggcgggcagactgcttgaggtcaggaattcgagacctgcctgggcaacatggcgaaaccctgtctctactaaaaatacaaaaattagccgggagtggtggtgtgtacctgtagtcacagctacttgggaggctgaggcaggagaatgttttgaactggggagatggaggctgcagtgagctgagatcatgccgctgcactccagcctgggtgacagaccgacactacatctcaaaaaaataaaaataaaaataaataacaagggggctgggtgtggtggctcacgcctgtaatcccagcactttgggaggctgaggtgggcagatctcttgaagtcaggagtttgagaccagcctggccaacatagtaaaaccccgtctctactaaaaatataaaaaaaattagccaggcatggtggtatgcgcctgtaatcccagctactcaggaggctgaggctggagaaccacttgaacccagtaggtggaggttgcagtgaaccaagatcatgccactccactccagcctgggtgacaaagcgacactctgtcttaaaaaaataataataaaaataaataacaaggaaacacaagctttcttgttacaattagggaagtaatatgttgtcattattagaatttctgatttcatcagttaacatttagatgtcctgaccagcatggtatagcacacacacacaaaaagaaatagtagtactaagagaaaagggcctcagataatttttatttaccgataattaacctatttgccctagaaaacctagctgaaaaactattcaagttaacaggaatttagaaagacaacaaggtacaaaatacttaaatattaatagctttctgatagactacccataatcagaaaatataatggggaaatgaactattttataatagcagcccaaaatatgtataaactaggaatagaattgataataattgtataagacttatatgaatgaaatcacaaaattttaaggaatctaagaaactaaacaaataaatattcctggttgggaagaatattttgaagctatcactatgatacagacaagaagagagagagattaaaaagaaaagaacagaaaatccttaagcagaccctaatatggataactatttgtatttataaatgaacaactttaaatcagaatgcaaatagctacttattcaataaatgggtcttggacaactgagtaaacatttggaagaaaataactttgaccttcatgtcaacccatacaaccaaataaatactatatggataaaaaaaaaaagttaagtgtagaaaatttccaaaaacacgctgctaaaagaatacttaccaacggtataaatcacaaaggaataggctgattaatttgattagatagaatttttaagcttctaggggccagaaaccacgttcaaaatgttagaagagaaaaacaagaaaagaatatttgaaacatatttgccaaaggacactttatatataagaaatcttagaaagcaagctgggagcagtggttcacacctgtaatcccagcactttgggaggccgaggcaggtggatgacttgaggtcaggagttcgagaccagcctagccaacatggtgaaacccaatctctactaaaaacacaaaaattagccaggcgtgatggctcgtgcctgtaattccagctacttgggaggctgaggcacgagaatcactcgaaccagccatttcttgtttcctcatttccaaactccacaagcctgagacagaaaaagcatgcactttagactgactaccttgagattcaaatcttggctcttccacttttcagctctgtgactgtgactaggaatcatgtttcatctctcagagtctctgtttcctcattgtgttgttggaggaatgatagcaatggatgaaatattgaatcatgtgcctggacataattattgcattattgttgctactcctacctaccatcataatcatcaccaccatcattactgtcaccatcaccatctccaccactataatcaccaacatcaccaacatcaatatcaccatcattgtcatcaccatcatcaccatcaccattgccatctccatcatcatcatcaccatcatcatcaccactgtcatcaccaccatcaccattaccgtcaccatcaccatttccatcattataatcatcaacatcaatatcaccatcattgtcatcaccatcatgatcaccaccatcatcaccaccatcatcactatgatcaccatcatcatcttcattatcatcatcaccaccatcatcatatcaccattatcatctccactgccattatcaccatcgccacagtcaatatcatcatcattgtcatcaccgccatcatcattactatcaccgtcatcatctccatcaccattatcaccagcatcatcaccatcaacaccatcgtcattatcaccatcatcatcaccaccattataatcatcatcaatatcaccatcaccatcataatcaccatcattattaccactgccattatcataatcattatcatcactgtggattactatcatcatcaccatcattaacttcatcatcaccatcatcactatcataatcatcaatatcatcaccatcaccattatcaccatcaccaccaccaacatcattattataattatcattcttgttgctgttattatgttctgtcattaagttcataatgatccagtttgtgataagatgacacactagtgtgggctgctagcttactccctacaaaacgaacacaggagagagagggaagcaaggcattgagggattaatataaaaaccatgagaaaccctgctggtgaacaggtgcatgtgtctggggggccacagtagatcataggacaggagggaggtgggaaaaaggagatttacattccgtttgtgcctttcccctttattgtcctgggagggtcagtgtttgttccatgtctcaggtgggattctttggaagcagacacagaaaaagagttttaggtgcaagatatttattagaggccaacacctatgaaaggaagggagaggaagcagaatcatcagagagggaaatcacagtgcatggtagattctcaacaaagatggttgaacgaataaatacttgaactaatggagttatatgcccagagtggggcagttaacttccatttcttccttccatgaaggtttttttaggtgtgcacttaataataaataatagtgaatatcatttgagtgcacacacaccagacactgttttctaagtactttacatgggtttgctctgaagtaggaatgattatcattggccaggcgcagtgactcacacctgtaatcccagctctttgggaggccaaggtgggtggatcacttgagtccaggagttcaagaccagcctggccaacatggtgaaaaaatacaaaaaaatagccaggcagggtggtacatgcctgtaatcccagctacttgagaggctgaggcacaagaatcgcttaaacccagggagtggagtttgcagtgagccaaggtcgagccactgcactccagcctgggcaacagagcgagactctgtctcaaaaaaaaaaaaaggctgggtgcagtggctcacgcctataatcccagcactttgggaggccaagaagggcagatcacttgaggtcaggagttcaagaccagcctggccaacatggtgaaaccctgtctctactaaaaatacaaaaatttagctaggcgtggtggcatatgcctgtaattccagctactcgggaggctgaggcgaatggcatgaacccgggaggcagagcttgcagtgagctgagatcgccccactgcactccagcctgggcgacagagcgagactccctctcaaaaaaaaagaaaaaaaagaaagaaattagccaggcatggtggctcatgcctataatcccagctactcaggaggctggggcaggagaatcacttgaacctgggaggtggaggttatagtgagctgagatcacgccattgcacttcagcctgggcaacaagagccagactctgtttaaaaaaaaaaaaatatcatcatacccagtgaatacatcagacaaaggaggcacagatgttaagcaactttcccacatgagtggtaagtagaggagcatggaacgtggctggaaataaactggacaggttcctgattgtacaagtttccgttccagctgcagagagagaacaatgaataaatcccagtaacaatgaataaagtcaagaagtgtcatgagagtagaataaagaaagtagaggggtggggggcatgtggagggaggcctgcctgaggtgacttgtgacttcaagtctagagaatgagaaggggccatccgtgaagatcccggaagcagaggggacctggaagagagaacgctgagcagagagaacagcatgtgcaaagtcccggaggctggagagaggtctgtctgaaggacgaaaaggcagcctgtgtgttcgatttgttgggaggaagatataaagcagtgttcataacttcttagtcctgggcctggcactcagcccacactgactaaatgcaacaattgttacaacttcattctaagaggtgggcgcctccgtagctgccctctggggctaagctttgggaagtcccctagccttcggatgtgaatcgtctgccgtgggaacctctcccaggtctggctcaggaaagcttgggaaggtcctaaccggtcagcgagtcattctttctcacgtcctcaaacacagccctggggtcacccccacctaccttccaggaagagggctggggattcagcacccctcccattctcctaagaaacctctgtcagatgacagctgactgcttttttttttttttaaacacaatagtcacattggagaagggaaaaactaaaaaaaaagaaagtgctcaaaagtcatttttatccaaaatatttgtatgtattaactatatattttatgcacactgcaatgactgctgctcaaggcagggttcttaagaaactgaagggccagtcatggtagttcaccactgtaaccccagcactttgggaggccgaggcaggtggatcacttgaggtcaggagttcaagaccagcctgatcaacatggtgaaaccccgtctctactaaaaatacaaaaattagccaggcgtggtggtgcgcacctgtaatcccagccactagggaggctgaggtgggaggatcgcttgaggctgggaggcagaggctgcagtgagctgagatcatgctactgcactccagcctgggcaacagaatgagaccttgtctcaaaaaaagaaaaagaaagaaagaaagaaactgaggccatttatattttaatggatgtttgtgcctgctaggggtagaaacccctgaatggtggagcgaaggcatttaaactgaactccccactgtgggaagcatcacaagacccaagtcccgggctgtgaggttggggaagggctattctggttgacctgaaaatatgactgcaattttgtctgattttgttaggaagtggaatctacctctcagcccttgaatctgggttggttttgtgattttatgaattggtttgactggtagaacctgtgttgtatgaatgacagcctgggagataggaaaggagtgttggggagggagagaggcagagagagggagatagatagatagaattatagatagatggatgcatagatgatgatgatgatagatagatagatagatagatagatagatagatagatagatagatagatagatagatagacagacagacagacagagccaggcacagtggctcaggcctgtaatcctttgggaggcaaaggtgggagaatcccttgagtccaggagtttgagaccagtctgggcaacatagtgagaacctgtccctacaaaaaaataaaaaattagctgtgtgtggtggtatgcatctgtggtctcagctacttgagaggctgaggtgggaggataacttaagcttgaaaggttgaggctacactaggctatgatggcaccactgcactcagcctgggcaagacagcgcaagaccctgtctcaaaaaaaaaaatagatacatactacgtagatagatatatagatagttagagtcgtaggtagatggatggatggatggatggatggatggatgatgtattcgtccattctcatattgctataaagaaatacctgagactgggtaatttataaagaaaagaggtttaactggctcacggttctgcaggctgtacaggaagcagggtgctggcttctggggcgacctcagggaacttacaatcatggcagaaggtgaagaaggagcaggcacgtcttacatggcaggaacaggagcaagagagagtgaggggaggggagaggtgtcacacacttttaaatgacagagtctcacgagaacttattgtcacactgtcacaagaatagcacaaaggggatggtgttaaagccagagatcctcaacctttttggcaccagggaccagtttcatggaagacagttggaaggtggcggttccaggatgattcaagaacattacatttactgtgcactatgatgcactgttgttatattattaccacattgtaatacataatgaaattattatacaactaggccggacccaaggcggctcatgcctgtaatcccagcactgtgggaggctgaggcgggcagatctcttgaggccaggagtgtgagactagcctggccaacatggtgaaaccctgtttctactaaaaaaaaaaaaaaaaaaaaaaaaaaaaaattagccgggcacagtggtgcaagcctacagtcctagctacccaggagtttgaggcgggagaatcacttgaaccctggaggcggaggtggccgtgagctgagatggtgccactgcgctccagcctgggtgacagagtgagacgctgtctcaaaaataaacgtataaataaaataaagacgactcagaaaacaaaatgggggaggtatggaggggagcagagagatagagagaggtgaagtcccttgagggagtactgtttgagcagactaaaggataaagagccagatgtgcctccagggtgacatccacacacctgtccagatgacaaacacaggttctcagcccccaccgtccacctaggattcctgagccctctcctgctgacacctggcagggtgctgagcccatgagctcatgggaagagaggagcccatagccatgaccccttgcccacccgctggacaccctgcccttcctctggggttcccagatgccctggcacagtgctacctggaggaaaaggaagagcgtcagccgggggcagcctctgccttgcgggccagctgctgggatgggagacctccttcccagccctcccccttccagggcaaccagaggagcagctggaaagttccaggctcaggaaatgcaaatagatgaatggagggaagtggacagggacactacacccatagacttgaggctgtcagtcaaaagtgctgaccctggagcctgtcccagaccctgtccgctggggagtcaggctgagagctgggtggcattctcgctccccatccacccatatctacacaaagtccagctcattttgcctctcgaattcccccccgagtcacccacttttctccctcctatggctgggccactgtcctgtcttcctgaatgacagcattgccaccttgccagcttccaggattataccctctaaccattccttccatgcccagttaaagggagctttctgaaacaaagagcagactttgcctcccctccgcataaaacttcccatgtctccccattgccttagggataaaagctaaagctatgccattggacccagacacaatggcctctgtctctagcttcccccattatagccactttcccctttggttctccttgctgtggatgagtgcaatcacctgtggccctgtgcttgtcccaggtccttcacatccttcaggtatgtgctgggcactgcttcctgaggaagcctccctggacttccaagtctggggctcaggggctgctcacctgggctccaactatcacacctgccatattgctttgtgcttactgaataatgcagtgtgggaagggaactgctgtggcatggccctgtgtgccctgatgagtcttctgcaggtgcaagtggtgagcagaggttgtccactgcaccatctgtgtgagttcaggtcactggcagagacaggcagggttagcaatacgggtgcccggcccctcggccaacgtgcctaacacaggttcccagaggctgtgtctctcaacatgccgttaacaaagcagatgttctaaggggttctgcatgctgcagcctctgggggacagtgtgtcacagagccttgcctcactgagcctcagcttcctcatctacagaacggggccaataaagccaacagggccttcctccttggatggttgtgaagattgcatgagattaaataaactacatagaaagtgctcagagaggggtgacccctcttttatgattcataaccagtgccagaagccacgccaggacacatcttgccattggaagtatgtaaagtaatggcactgtgcttctgtggacatctcattacgagaatgttcagttcttgggttatattaagatgcggttttcctgttgaagcctctaaagtcccttgtggtttctctggggtccaacagcctggatgcgaaaaagaaagagcccagcctgctgccccaccccgtgttactatgagaattggggaaccagcccctggggacacagatgctatcacaaagagtccctgaattggcttgccacatttaacggataaatatataagatactcaggttcctatatttgatctggcaaccctatttccagaagtgtgctaggtactctcacttgtctgaataagtaacatctactgcatatatatagatctatttttctttttcttttcttttctttttttgagacaggatctcactctattgtccaggctggagtgcagtggggcaatcatagctcactgcagtgtccacctcccaggcttaaaggatcctcccatctcagtctcctgagtagctaggtcaacaggtgggcaccaccatgcctggctaatttctaaattttttgtagagacaggatcttgctatgctgcccaggctgatcttgaactcccgggctgaattgattctcctgcctcagcctcccaaagtgctgggattacaagcatgagccactgtgcccagcctaattatctaatctaagctttttgcctacacacacacacacacacacacacacacacacacacacacacacggagagagagagacagagacagagagggagagaactgaaagaggaccaaaagaagaataaagaagaacagtccagctgggtgcagtggctcatgcctgtaatcccagcactttgagaggccgaggctggaggatcacttgaggtcaggagtttgagaccagcctggccaacacggcgaaaccccgtctctactaaaaacacaaaaattagctgggcatggtggcatgcgcctgtaattccagctactcaggaagctgaggcaggagaatcacttgaaccagggaggcagaggttgcagtgagccgagatcgtgctattgcacttcagcctgggtgacagacgaagactctatcacaaaaaaagaaaagacaaaagaaacagttaaaatgtttcttacaacgctaaatatacatttgtcatagcacccagaaattctattcctatgtattttaccaagataaatgaaagcatattcacattgaagtcttgacataaatgtttgtagtgatattattcataattgccaagaaaatatacaatttggccgggtgcagtggctcacgcctgtaatcccagcactttgggaggccaaggtgggaggaccacgaggtcaagagattgagaccatcctggccaacatggtgaaaacctgtctttaaaaatacaaaaattaactgggcgtggtggcacgcacttgtagtcccagctactcgggaggctgaggcaggagaatcgcttgaatctgggaggcagaggttgcagtgagccgagattgtgccactgctgggagacagagactccctctcaaagaaaaataaaaaagaaagaaagaaaaagaaatgccacttgaggtggccacctgttgtccagctactcaggaggctaaggtgggaagatcgcttaagcccctgagaggttgaggttaccgtgggctgaaattgtgccattgcactccagcctgggtgacagagggagaccctgtcccccgacccccccaaaaaaaagaagaaagaaaagaaaagaaaaaagaaaatattagaaatcatgtagacaaattaagactgtagaatttcataaatacatgttctaatttccaatataatttcaactacagtaagatgataatcagatacattccttttggtggttgctattgccgcactcttagatatgaagtgaacagctccctgaaattcgcactctctgggcttctgggaactatattttcatcattctttggctcccgtctgtgcttttctgagacatgcctgttcacaccctttctttctctttttttcttttcttgctttttcttcttctttttttttttttgagacagagtctccctctgttgcccaggctggagtgcaatggcgcgatctcagctcactgacgcaacctctgcctcccaggttcaagcgattctcctgcctcagcctcccaagtagctgggtctgtaggtgcccaccacctgcccagctaattttcaccatgttggccagtctggtctcgaactcctgacctcaactgatccacctgcctcagcctcccaaagtgctgggattacaggcatgagccaccaagcccggccccaaattcttaattttctatttctgttgtgtttttttcttatcaatgtgtgaaatctctttgcatataaaggtaccaacccttctcaggcaaccaattcatctttctttattgcttttgtatatacttccctgataatttataaaattattctgttagttatatttatttttattataagatttttaacagatgtttatatagttttttgtttgtttcgttttgttttgttctgttttgtttttgagacagggtcttgttctgtcacccaggctggagtgtggtggtgagatctcagctcactgaaacctctgccaccagggttcaagtgattctcctgcctcagccttccgagtagctgcaattataggtgcccaccaccacacccagttaatttttgtatttttagtagagacaaggtttctgcatgttggccaggctggtctctaactcctggcctcaagtgatccacctgcctcagcctccccaagtgctgggattacaggcatcagccactgcacccggccacgtttatatagatttttatgtattaagtatttctgtggtttcattcatagcttctgggttttctgtcttagttaaaacacacacacaacaatttcaaaaaaagcatgttttcaaccctcaattgtaaaaatagccttgtaaattccttctatgatctgtattggtttattgttcacatttcatctttaacccaactgaaattatgttgttttctgcagcacaggaatatttcactctgccacgtctctgtcaaaagtgggagaaaaggccaggtgtggtgactcacatttgtaatcccggcactttgggaggccgaggaggaaggatcacttgaggccaggagtttgagaccagcctggccaacacagtgagactactccaagaaaaaaataagcgtggtagaaggaagggcaaacccgtgtctcacaccccatggccctcactaactcaggctgctgcctggcccctgtaagccttccggctttccacaagggtcggttttttttcctgttttgctttctgtggtctttctggccagaggagaagccatggggaagtgctgcccccacgtggccatctccatgatagcagctaaggctggaagaaaaaggctttttgttgttgttgtttgagatggagtcactaggctggattgcagtggtacgatcttggctcactgctatctctggctcccaggttcaagcgattctcctgcctcagtctcccgagtagctgagactacaggcgtgtgctaccatgcccggctaatttttggatttttaatagagacggggtttcaccatattggccaggctggccttgaactcctgacctcacgatccgcctgcctcggcctcccagagtgctaggattacaggcatgagccaccgcacctggccaaggcatcttttaaagctgaaagcaaaataggttcacaggcccctgcttaaaaccctccaggggcggctgatgcctgtaattccagcattttgggaggccgaggtgggaggatcacttgagcccaggagtttgagatcagcctgagcaatatagcgagaccctgtctctacaaaaaataaaataaggccgggcagggtgactcatgcctgtaatcccagcactttgggaagccgaggtgggtggatcacctgaggtcaagagttcaaaaccagcctgaccaacatggtgaaaccccatctccactaaaaatacaaaaaaaaaaaaaaattagccacgtattgtggtacatgcctgtaatcccagctacttgggaggctgaggcaggagaatctcttgaacccaggagccggaggttgcaatgagccaagactgcgccattgcactccagactgggcaatagggtaagactctgtctcaaaaggacaaaaataaaataaaatagcaaggcgcggtgttgtatgcctgtggtcgcagctactccagaggatgaggagggaggctggcttgagcttgggaagtcgaggctgcagtgagctatgatcacaccactgtactccagcctgggtgacagaatgagaccctgtctctcagaaaacaagaataaaaactttatttacaaaagtaagcattgggttaaacttggcctaaaggttatactttgctgacctgtgttctattgcatatattctgctggacgtgatggctcacatctgcaatctcagcactttgggaggccgaggcaggtggatcacttgaggccaggagtttgaggtcagtctggccaacatggtgaaactctgtttctactaaatatacaaaaattatccaggtgtggtggcacatgcctataatccccagctattcgggcggctgaggcaggagaatcgcttgaacccgggatgcggaggttgcagtgcagtgagccgagatcacgccactgcactccagcctgggaaacacagtgagactctgtctcagaaacaaacaaacaacaccacaaaagaagaaggaaggaaggaaggaaggaaggaaggaaggaaaaaaaatctctccagcggtacatacccaaatgttgaaagcagggactcaaaacaaatgtttatacacccatgttcttttttttttttttttgagatggagtctcgctctgtcgcccaggctggagtgcagtggcgcgatctcggctcactgcaacctccgcctcccgggttcaagcaattctcctgccttagcctcccaagtagctgggactacaggcgagcgccaccacgcccagctaatttttgtacttttagtagagacggggtttcaccatgttggccagaatggtctcgatctcttgacctcgtgatccacccgccttggcctcccaaagtgctgggattacaggcgtgagccaccacgcccagcctatacacccatgttcttagcagcatgattcacaattaccaaaagatagaaataacccaattatccaccaatggaatatgattcagatgcaaaaagaaggaaattctgacacctgctgacatggatggaccttaaagacattacgctgggtgaaagaaaccaggcacagtaggacaaatcctgtgtgattccacttataggaggtccctaccgtcactagattgacagagacagaaagcagaatggtgggtgccaggggctggggagggagatggggagcgagggtttcatggggacagagtttcagtttggagatgagaaagtgctggagatgattgcacaacaatgcgaatgcatttaatgccactgaactgtgcacttagaaatggttaacaagggccaggggcggtggctcacgcccgtaatcccagcactttgggaggccgaggtgggtggatcacctgacatcagaagtttgagaccagcctggccaacatggtgaaaccctgtctctactgaaaatacaaaattagctgggcatggtggcaggtgcctgtaatcctagctacttgggaggctgaggcaggggaatcgcgtgaacccaggaggtggaggttgcagtgagcagagattgcgccattgcatcccagcctgagcaacaagagagaaactctgtctcaaaaaaaaaaaaaaaaaaaaaaaaaaggttaaaatgggctgggggcagtggctaatgcctgtaatcccaacactttgggaggctgagatgggaggattgcttgagtctaggagtttaagaccagcctgggcaacataatgagaccccttctgtacaaaaaataattaaaaattacccgctcatggtggcacgcacctgtagtcccagctactcgggaggctgaggcaggaggattgtttgagcctgggacattgaggctgcagtgagttgtgatcccaccactgcactccagtccaggtgacaaagaccctgtctcaaaaacaaacaaacaaacaaacaaaaacaaagggttaaaatatagaattaatcatgtcttttgcagcaatatgaatggaactgtaggctgttatcatcttaagtaaaacagttcagaaatagaaagtcaaataccgcatgttctcacttataagcgggaattaaatcatgtgtatacgtggtcatagtgcggaattttagacagtggagacccggaaggggtaaaggaggaagggcgggaggggtaagggatgagaaatgacttaatggctacaatgtacattacttgggcgatggttacactaaagcccaggcttcctgctgcgcaatctatccatgtaacaaagttgcctttatactccttaaatgtatacacattttaaaaatcattttttaaatttaaaaaaatggttaaggccaggcacggtggctcacgcctgtaatcccagtactttgagaggccgaggtgggcagatctcttgaggtcaggagttcgagaccagcctggccaacaggatgaaaccccatctctactaaaactacaaaacattagccaggtgtcgtggcaggtgcctgtaatcccagctactcaggaggctgaggcaggagaattgcttgaacctgggaggcgggggttgcggtgagccgagatcgtgccactgcactccagcctgggcagcagagcgagactccgtctcaaaaacaaacaaacaaaaaaggtaaaagggtaaatgttatgttatgtgtcttttcccaccaacgcaagcagtaaagggtagagcaggtggtggccctccctgcgggctggacggggtggtggaggggaaggaagggagccaggtgtgcacagccgaggggtggcctctgcattcggccttaaggccaatatcaggtgtccggggcgcagtggggacagaggccagggttcagagagtggggaagcgtggacaggaagtgtggacggtactcccaaacagcacagagtatttctacagcacagaaatatttcactctgctatgtctctatcaaaagtgggagaaaagggcaggtgcggtgtgtcgtatttgtaatcccagcactttgggtcctgtgacagtcctcctccgcctggctccagccacacctgcttccttctgttcctcaaacaccccaagctcagtcttgcctccaagcctttgccctggcagtttttaccacccagaataactttcccctagattttttttttctcactctatcacccaggtgggagtagggtggcacaatctcggctcactgcagcctctgcctcccagattcaagtaattctcctgcctctgtgtcccgagtagctgggattacagacagacgccaccacacccggctaatttttgtatttttagaagagatggggtttccccatgttggccaggctggtcttgaactactgacctcacgtgatccacccgcctcggcctcccaaagtgctgggattacaggcgtgagcccccacgcccagctagacattgatttatatgcctgacttcttctgagcttacagatctcagctcaaatggccttccctgaccttcccagctaaagcatcaacctcccccacccactctatcgcatcactctgtttacttcctgttgcggcaattcacagcacctgaatttatctcctaggtgtgtttcctgattcactgtttgcctcccccagctggagctcctgcagggcgggggtttgtgtctgtcttgttcaccgtgatcccacacctgccacagtgcctggcatacagtaggtgctcgataaatgcatgttgcctgaaagaaataatcaactggttacagaatgggtgtgtgcaaatctgtgtatatctgtgtctccttgtgttctgtgtgtgtctcgttggtgtgattctggggatggccccacctgtgtccccagggacaagcgcggcgctatgggccagtgagtgtttgtggtgagggctttccgggtctgtgtgttagtgattttgagtggtcccgtggcaaccggtgtgcaagtcagtgtctccagaggtgttctcagaggtggccagcatctgctcttttttgttgttgttgttttgtttttgtttgttgtttaagatggaatctcactctgttgcccaggctggagtgcagtggcatgatcttggctcacggcaacctccgcctcccgggttcaagccattctcctgcctcagcctcccgagtagctgggattacaggcacatgccaccacacccggctaatgtttatatttttagtagaaatgggttttcaccacgttggccaggctggactcaaactcccgacctcaggtgatccacctgcctcggcctcccaaagtgctgagattataggcatgagccaccgcgcctggccagcagcatctgctcgtgtgtgtgtgtgtgtgtgtgtgtgtgtgtgagtgttctgtgtgactgtggctgtgagtccacatgtgtgtcggggtgtttgttgtgtatgtgtgtctgcatgcccattctgcatgtccacatgacactgcatgctcctgtgtgaagttgtgcccatgagcacacgtgtctgtgtttgcgtatccttgtgtgtcctctgggtgtgtccttgagctttgtgttccaggagcctgcagccctgttgtgcagcgctgttgtgctctgttgtgcacgtgcatgtgtctcgtgtcctctgtgtgtggggtggctcctacatgtagttgtgcacacttgtatctgcctctgtgagtccctgtgcctatgtgtgaccatgtgtgaagtgtgattgtgcagtatcccaaaaccatctgtgtgcaccgctgtgcagtagtgtgctggtaaatgttgaacctctccagtggagagcactgatttatagcattgccagtcctcatggtgtaaatactctcgccacagccaatttcaagtgatgccaccgaacagtgagtcagaaagatatggacagcagcaaaccattatacagtatttctaccaaacaggttccatacacaaaagcaacatcaaaagcatagattatgaggccaggtgtggtggctcacacctgtaaccccagcacttccggaggctgaggtgggcgaatcctctgaggtccggagttcgagaccagcctggccaacatagtgaaatcccgtctctactaaaaatacaaaaattagcctggtgtggtgggggtcacctataatcccagctacctgggaggctgaggcaggagaatcacttgaacccaggaggcagaggttgcagtgagctgagattgcaccactgcactccagcccgggcaacagagcaagactccatctcaaaaaaaaaaaaaaaaaaaaaaaaaaaaaaaaaaggaaaaggaaaaaaagcatagattatggaaaatgcagcaaaaataatgttaaagtgattaatttaaatgtggtaaaataggcataacgtaaaatttaccattttaactttctttaaaaaaaatgggatttcactctgtcacccaggctggagtacggtggcacaattataggtcactgcagctttgaacacctgggctcaagtgagcctccccgcctcagcctccggagcggctgggactgcaggcaggcaccaccaaatgtggcgaagttttaaattttttgtagagtactcactccagtgacaggctgaagccagcccaagagccaagtttagtggagcatcatggctcatgcctgtaatcccagcactttgggaggccaaggcgggtggactgcttgagcccaggagtttgagaccagcctgggaaacataataaaatccctgtctctacaaaaaaaaaaaattaacttaggctgggcgccatgtctcgtgcctctaatcccagcactttgggaggccaaggtgggaggattgcttgagcccaggagttcgagaccagcctgggcaatatggtgagaccctgtctgtactaaaaatacaaaccaaaaaaaaatagccaggcgtggtgatgtgtgcctgtggtcccagctactcaggaggcggaggtgggaggatcacttgagcccaggggatggaggttgcaatgaaccaaaatcacccccactgcactccagcctggatgacagagtgagagcctgtctcaaaagaaaaattatatataaaaaattatatataaattatatataagtctatatataatccatatataattatatataaagtatatataaattatacataaattatctgtaaacaaaaaacttagccaggcatggtggcatgtgcctgtaatcccaactactcaggaggctgaagcagaaggatcacttgagcccaagagattgaggctgcagtgagctatgatttttccactgcactccagactggatgacagaatgagaccctatctctaaaaataaaataaacagttttttgttgttgttgttgttgttttctaaaaaaagccaaatctgagcatttcctatcaactccacactcggtgacatcacactggtaggtgaaatcggccatgctgggggtatttacaccaggagaattggcaatggctacaaatcggagaggtggttgttaaacgttaccagcacaccatgttgttccgccagcttccaggtacccatgtaacaatgtagccacgtgtgtttctgtctctctgtgtgtacccaccatgctggtgtgtgtctgggtgcctgagtctctacggatacacatgacctgcacgtccctatatgttgctgtctatacacccatgtgcctgggtgaggcccccacaccctgttcctcttcagcagttggttccacaggaagctgctggggtgggggttgaggacgctgggcctccctccagctccccacccctcctcctcaagacacctgcatgcgcagggctgaggggtgggagcagggctctctgcctccagaacccccatcctctgggctctttttaggcccctagattggcctgcagctgggagcagagtggcaagcatgcaggcaggcagttgagaaagaggaagtcgaggtgctattgggtcattctgtggttatcccaggctctacccagccagcggttcccttgggccagctcgaaacgctggccgtaggtcatgggagctgcaggagctgttagccaggctaggtgcctgcaggttgaagaactgagctctatctggtaagtacttatcctgggaagtggagagagatggacccatcgggacagagtggcagtggggtctgggaagtctagggggacagcgagcagacatacatcactgtttctctcccccttgcagtcaacttgcttcctgagtgggtgggggaagctgtttgacccttgcgttcattgtgcagagatctgtggtcataagaggtcaccccaggggacggggatccttgaggggctgctaggtaagaaaggagggtggaggccgggcgcggtggctcacacctgtaatcctagcactttgggaggctgaggagggcggatcacttgaggtcaagagttggagaccagcccggccaacatggtgaaaccccgtctctactaaaaatacaaaaattagccaggcgtggtggcgggcagctgtaatctcagctactcgggaggctgaggcaggagaatggcttgaacccgggaggtagaggttgaagtgagcctctcagtctcaaaacaaagaaaagaaaaagaaaagcaaagaaaggacgatagagctccttgtagccaaggccctcctgcgtggagacaggagacagagaatgaatgggggagctggggcaaaggctcaggtgccctttgcatcttaaactgcagattccgggccccccaagaacctccctgttgcagattctgaatccactgtcaaaacaaactcacacttaaggctgatggctgacaaccagccctgagaagggtcttgtcctgatctgaaatcatccagagagcacatccctccacccaggcagccttcctccaggtgagggttctcccccttgggagacatcccctgtctcctctcgtggccccttcttagggggacctcctgcaccaccgcctgcctgggactgggaggggtgggggaggaaggctgcggtttctgctgggcacacccagtctgttgtttcctgccagcccccaatgctgcagggcaggcttcaggcaccctgaggtctaggaaggtggccccagaaccaggagggagtgaattgagctagagtggacagctggggccagagaggatggagctaggaagtgacgctgggggctgatgctccaaggccaggtcacctgcagttctgagaaaagaacatgacaaccaaaggaggtcaggaaagggttgccctcataatcagccacatttcaactcccttgctgtgactgggagtcactctgggagggctgcttggtagaggcagccttttcattatgccttgaagaaccagtagatggcaactgcaaacacgtcggtgcttctggtctgggctgtctcccatgcctccctgggcatcccctagcccatgacaaagggatgggcatatgttgatgctcgatactgttgtagatgacatggtgactgtgttggacagctgggcgttcaaatcccagttccctggcctctatgtggccttgggcaaatgacttaactgctctgagctttcgtttgctcatctgttaaaaggctgttgagttttttggggtgggtgtgtgtgtgtgtgtgtgtgtgtgtgtgtgtgtgtgtgtgtgtgtgtgtgttggagatagaatcttgctctatcgcccaggctggagtacattggtgcaatctcagctcactgcaacctccgcctctcgggtttaagcaattctcctgcctcagcctcccaagtagctgggattacaggcacacgcctccatgcccagctaatttttgtatttttagtagagacagggtttcaccatattggttaggctggtcttgaactcctgacctcaggtgatctgcctgccttggcctcccaaagtgctgggattacaggcatgaaccacctcgctcagcctttatgaagtttggtctgtgagatcttagtgcagtgtctggcacgtaatagatcagaaaacattgtcagcctcacctatgccttcatactgaccttgtccccaggccttccttcctgagcagtcccaccatcttctgaaatgttctgggtcatacccatggtggatctcaatctgtaagcaagtctgctagagtggacttcttttgtttgtttgtttgtttgtttgtttgtttgttttgagatggagtcttgttctattgcccaggctggagtgcagtggcacgatctcggctcactgcaagctccacctcccgggttcacgccattctcctgcctcagcctcccaagtagctgggactacaggcgcccgccaccatgcccggctaattttatgtatttttaatagagacggggtttcaccgtgttagccaggatggtcttgatctcctgaccttgtgatccccccacctcagcctcccaaagtgctgggattacaggcatgacccactgtgcccagctagagtggacttcttaaggatcccatccagccatccctgtatcatatgctactgtattttctctctgcctctctctctctctcttttttttttttttttctgagacagagttgcccaggctggagtgcagtggcacagtctcagctcactgcaacctccacctcctgggttcaagcagttctcctgcctcagcctcctgagtagctgggattataaatgcataccaccacacctggctaattttagtagttttagtagagacagggtttcaccatgttacccaggctggtcttgaattcctgacctcaggtgatccacctgccttggcctcccaaagtgctgggattacagatgtaagccactgcacctggcctgttgtatttttaattctagcatctttatctcctgtagggctgttgctattgtctgtgtttcttcttgttttttggtcatgaggttctgtcttctagtatgcctggtagtctgattaaatgccaggccttgtttgtgaaaaactatagggataatttgtgtctctttatggtgtcattttcctccatagagcgtttatttttgctttgggcaggcagttagagaaaggaaagatcactttaatctgattgtgacctatgctgacttgaagatggattttgctctcggtgagggctagtctatgtctggtccctccttgctcctagggtgtagtcttttaggggtggcaatcacctcctctttttgggccctgaattccaatgtttatttccccaacataagattgctaagagctacattcaggttctcaggctttttctggtctgcctcccactcactcaagaactgtgttcaaatcaacaacttgtttgtgagggaaaagcattacattatgtccttctcactttcctaggtttccttttttttttttttttttttgagatggaatctcactctgtcacccaggctgtcgtgcagtggcatgatctgggctcactgcaagctccacctcccaggttcacgccattctcctgcctcagcctcccgagtagctgggaatacaggtgcctgccaccacgcccggctatttttttgtattttcagtagagacggggtttcacagtgttagccaggatggtctcgatctcctgacctcatgatccgcccacctcggcctcccaaagtgctggaattacaggtgtgagtcgccgtgcctggccttttttttttttttttttttttgacatagactcttgctctgtcatccaagctggagtgcagtggcatgatcttggctcatcacaacctctgcctcccaggttcaagcgattctcctgcctcagcctcctgaatagctgggattacaggcatccaccaccatgcctggctaattttgtatttttagtacagacggggtttcaccatgttggccaggctggtctcgaactcctgacctccagtgagttgcccacctcggcttcccaaagtgctgggattacaggtgtgagccaccgcgcctggcccctaggtttcctttctttccagggccgtgattcttccaactctgactgccaatgccttccaagcaagggtggtttttcactcttccaattttgtccagcttttctatttgttcttggtgggagaataaatctgcaataagctagcctgccatcattagaaatacatattccagctgggtgcagtggctcacgcctgtaatctcagcactttgggaggctgaggtggttggatcacctgaggtcaggagttcgagaccagcctggccaatatggcaaagccctatctctactaagaatacaaaaaattagccaggcatggtagcgggcgcctgtaatcccagctacttgagaggctgaggcaggagaatcacttgaacccgggaggcagaggttgcagtgagccgagattgcgccattgcattccagcctcagcaacaaaagtgaaactccatctcaaaaaaaaaaaagaaaaagaaaagaaaagaaaaagaaaaagaaatagatatccctgttgtatttttttaaagtgagatttagccaggtgtggtggctcacacctgtaatcccagtactttcggaggccgaggtgggaggatcacctgaggttaggagttcaagaccagtctggccaacatggcaaaaccctgcctctactacaaatacaaaaattagctgggcatggtggtgcacgcctgtgatcccagctactagggaggctgaggcaggagaatcgcttgaatctaggaggtggaggttggaggttgcagtgagctgagatcagccactgcactccagtctgggtgacagagcaagactctgtctaaaaaaaaaaaaaagaaagaaagaaaaagaaaagaaatagatatccctgttgtatttttaaagtgagatttggctgggtgccatggctcacgcctgtaatcccaaaactttggaggctgagccaggagggtcacttgaagctcggagtttgagaccagcctgggcaacatagaagaccccatccctacaaaaaagaaaaaagtaaaaaaaatagccaagtgtgatagcatgcatgtacattcccagctactcaggagtctgaggcaagaggattgcttgagccaacgggttcgaggctgcagtgagctatagatcatactactccagcctgggtaacagagtgagatcctgtctcaaaaataaaagttaaaaaataacaggctcatgcctgttatcccagcactttgggaggctgatttggggctgggggtgatttggggctgggaagtaatgtaaacaattgggagactgaaggagggagtcacacagcaagtacgtgctggaggagctgggatttgaagccaggatttgaagcagggatttttcagacacaaggagtgaagacgctgataaaggagcttccaccacgagggggcagcacctgcacggatgagcactcgttgacacacacacaccataccccacacttgggtacagagagaaaggtgatgtggctcaatgcctgcaatcccagcactttgcgaggccgcggcaggaggatcgcttgtgcctgggagttttgagaccagcctgggcaacatagtgagaccccagctctacaaaaaatacaaaacttagccagtgtggtggcacacacctgtagtcctagctactcaggaggctgaggccggaggatcccttgagaccgggagttggaggctgcagtgagctgtggtcacgccattgcactccagcctgggtgacagagcaagacccatctcaaaactaacaaacaacaaacaaaaaacagaaacagatgaagacacaaatatgtagaaacacagaaacccaggcggacaccaaaaccacctcatagatactagaaacagatctccccaagacacagatgagtcatgtagttaaatctgacctcacggataccaatgggcttcacacacacacacacacacacacacacacacacacacacacacacagacaatcacagagacacttttaaaactatctagataatcaaatacacccccacattgacaagctgatattcagaactcaccctgaaacacagaatcacaaacccaaaagcacgtgctctctacacaacatggaaatgcatcatcaaacccaccaagacgatggcacgcacacacacacaaacactcagacatccatgcacacccaggctccccgagggacccagtttgtacttgtatttccctaagattgtcttgtccagccagggtaagaggcctgtaagactgggtttaagggacagagggtgctaaagggcttggcttctcctcaaaccaggggtccctgggcccctgagctggaaaccccagcccccctgctgaagccccaggcttctatcagctgatgtatctggcagaccttggaggcagtctccgcccctcttactggcagccccatcctggcagggattcccaggccagctcacactcaagctctcacacgcacgcatggcccccatggctgactcggtgctcaaccactcctggccggccttctccaagctgtggctgaagcggtgggccttcaagagaggtaagcagctggcagtgaccagcgggagccatccacccaggtggggatcccaggacagcctgcccgccatcccccttcgagctttttcttggctgcagtacagactctgctggcatcggccctggattccatgacccctgattctccagggccccctggaattatcacagacttgtggggtccctcttgtttcagaggaaatgtctcccaagacttggccaggaatttgtctcgggcggtaaatttgcagaaagaaagtccgccctcttaactcagccgctgaactcctcaggggcagcccagcgatctcctgggggtcccagatgctgttggtttctggcccagctgcaggacaggaggctcagggcagaaacaaaaacggggggattagaggctctggggcacacacctccctccaacacacatacacacacacatcggctggtgctctctctctcaacccccagggtccccaggcctcaggtgacctctctggggactgataacagcctttattatgtcatcaaaggcctgagtgaactgttgttgcaaagagagacactttttctttttttttttttttctgagaccgagtctcattcggtcgccgaggctggagtgcagtggcgcgatctcagctcattactgcaaactctgcctccagggttcaattcattctcctgcctcagcctttcgggtagctggaattacaggtgccccccaccacacctggctaatttatatatttttcgtagagacggggtttcaccatgttgatcaggctggtctcgaactcctgaccgcaggtgatccacctgcctcggcctcccaaagtgctgggattataggtgtgagccagcgcgcccagccatcaaagagacacttcttaatgctcaagagtttagcccttgaagataaccagatgatgtcctggtacgtagggcatgagaggacagtgctggacaatatcataaaagctggtcatgcactcattgcctcatgggttttcttgtctccggctccccactgcccatatgagcgcctcctggtcaggccagccgcatcgcttagcctgcatgacttgttagtcacagccaccatcacctgcatgagccacgtacttgttcaaggtagcagtgagttttcatgaaagagggggccaatgtgaagattcgttagctcattcattccactgaccctccttgaaggctcattgtgtaccaggcactgtgccggggtcagggagcagatgggagtgccaggggacccaagggctggggttagggggagagaggatggcctgggaactgggatgcaatagaagagtaatcatcaggataaaagttgttggtggctgttgagctctcatgaagttgggctcagagaggttgagcgacttgctcgaggtcacacagcaagtatatgctggaggaaccgggatttgaagccgattctgtgtgaggccactttgatgtgttctgactgatgaacaaagctgccagtgtgggcagctggagtgcctggggagggtttttagatccaacggtggatggcgatcctgaagaatcagtgtatctgccatggattaccaaagtgtctgcctgtgacccaggtccctaagaagttctgtccctcttgtggctgctcagctcaccctgtctccctgcccaggcagttgaggctgggatttatatgctagcaggtgggggagtgagctgtgggaactgacagtgactcttaaacccttttatggctgatgctgtgggggctgatagtggaggaggctgcctgggactgaatccaggctgatggacagctccttggagagaagcatgggggtggggagcagggtgcatccccaacagagcccctttccctgaggcctcatttctcctctggcttagctcccctgggagagtgactcccttacagcgtgtctcctgtcatcagccttggaaagcagggaagaatggcctttttgtcaccctcttaagctctgtaattggctgtctgggcacctaataggaatttcccggggaaagggtgggattggacttggggtggcaagtaaggcttgagagaggagaactgagaccttcagtgaagggtcccagtgccccttccccatcaactgcccccattacccattctgctcatgctttttcattcattcctcaatctgttggtgcatgtctgatgagtgcagtctgtgcctcgctcaccttggtttccttcctgtgtggctcttctgccacaattctgtccctcttccttctatatgtgcttcctcaccccctcagaatgccatctcctgagtgtaatgcatcgctgcctctggacactgccatataacctatccatcccactatctacccattcatccctgcaaccatgcagccatccaactatctatccagccaaccagccaatcagccaactcttcaaccatccatccttccatccatccatccatccatccatccaatcagccaactcttcaaccatccatccttccatccatccatccatccatccatccacccatccacccattcttccatccattcttccatccatccatccatccatccactcttccatccatccaaccatccatccattcaacatccattcatccatctacctatccatccacccatccactcatacatccaattatctactcattcatccattcacctatccatccatctacctgtccaaccattcatccatccacctatccatccatctacctatccaaccattcacccatctgtctatccactcattcatccatccatccatccttctacacatccacccatccattcaaccatccactcacccatccatccatccatccatccaaccatctatccatttatctacccatttatccaaatatatgggcactgactctgtgcccaacccaacacagcagaggatagcctggtgattgggatctcttctttgaattcagaaacatctgaatttgactcccagctctacctcataccagattggtatggccttggtaaagtcagtgcacctctctaaacctcagtttccctttctataaaatgaggactcagagttgctgtgagtatagaagagtgaaaagtacatgatgggcttagcactaagccagacatatagaaagtgattgatacaagattttaccttttggagcttggggatgtaaaagtggatcagatatagtcactgccctcacagacctcatgctctagagcatggatcagcaaaccttttctataaagagctaggcagagcaatccaaagtcctatggctaaaattgtctgcagaggatctgagacagagccctcagttgccaggcaggaagagtggtaggaacagcacagagataccaggagaatggtgagttgggtgtgcatgtgtgtgacagggaggtaagaggacaggctgaggagggctctgaatgtcattctaaggggactggagtctataggggtggggatcagtagaaggggagtgaccatcagagggttatatcaaaaggacacaccaactccaggacagaagatggactacaggggagagactggtagctgaggatcagtgacaaatgtgattggcaatcgtttggggcaattgtggttggtaattgacagagctcagtctatgacactgggattagggcttagctcataatattggaatcaggacacagcctatgacatcaggattggagctcagtctatgatgccagatcaagattcagtctatgacaccaggattggggctcagtctatgataccaggataagagctaagactatgacaccaggattagggcttagcctatgacactaggatcagggatcaatatatgacaccaggataaaggcttagtctatgacactaggaggggggttcattctatgatacaagaatgaatgctcaaccaatgacagccagatgaagttcagtctgtgatatcaggatcaaggctcagtatatgacaccaggatcatggctcagtctgtgacacaaagattggagttcaatctgtaaaactaggatcagagttgagtcagtcattgggaactaggatcacagttgagttcatcatcaggtcaagctcaacctgttcctcggtcagaagcttccctataaaaacaaaactcagccaggcacagtggctcatgcctgtaatcccagcactttgggaggccgaggtgggaggatcatatgagaccaggagttcgagactagcctagccaacatggtgaaaccccatttcaactaaaaatgcaaaaattagctggacatggtggtacacatcggtggtcccagctactcagaagtctgagacaggagaatcgcttgtacccaggaggtggagactgcagtgagccaagatggaaccactccagcctgggtgacagagcaagactctcttgaaacaaaacaacaacaacaacaacaacaacaaaacatgcacaatcacacaaccctggcatttcttttcttttcttttttcattcttttcctttttttttttctttgagacagagtctcactctgtcacccaggctggagtgcaatggcacaatctcagttcactgcatcctgcccttccctggctgaagagattcccatgtgtcagcctccctagtagctggaattataagcacatgccaccatgcccagctaatgtttgtattttcagtagagactaggtttcgccatgttggtcaggctggtctcaaactcctcacctcaagtgatccgccttcctcggcctcccaaagtgctgggattacatgtgtgagccactgggcccggccaaccctggcctttcacctttgatctttggatcccagaccttcagggttcacagatacagggcatgaggtcctgcaggctacaggaggcctcaggcctccacaaggaccctgtccagtgaagcaagccaaccctgcaggctctcctccagccctaaggggacttggctgaggaatgggactgcctttcccctcccaagctcccaccaacctccaggaccctcccccacatctggctttcctcctccttcacagcctgcttgtttcgtttctgtgagtcatagatgctgcttcggcttctgggtggggaagagaacagatgcaaagcttaacaacagcagctgaacagagtccctccaaccagcccgggagggcaacctggaaagcagtgatggtggaaaccctggcattgctcgttactgtccagccactcatctgtgaatacaggtggcatcagggggcaaatttaccttgaagcaatggaaactgaagcttcaggccccatgtgtacctgccccatccaaagctctgcaagaggctccaacaaaaaactttttaggaacagctttattgagctaccatatacttcacccatttaaagcatacaattcagtggttttaggccaggtgcaatggctcatgcctgtaatcccagcactttgggaggccaaggcggggggattgcctgagctcaggagttccggaccagcctggccaacgtagcaagacccccgtctctactaaaaataaaaaaaattagccaggtgtggtggtgcatacgtgtaatcccagctactcaacaggctgaggcaggagaatcactcaaatcccggaggtggaggttgcagtgagccaagatggcgccactgcactccagcctgggcaacagagtgaggctctatctcaaaaaagagactgcataacagcggttcctcaaaaagctaagcatagattagcatgtactccagcaattcccttcctaggtaacgacccaagacaatggaaaacacacatccgtgcaattgcgtacatctgtatgcaattgttcatggcagcgtgatttgaaataaccaaatggtgaaaacgacccaaatgtccatcaacagatcaatggatacacgaaatgtggtatctccatgcaattgaatattattcagccctaaaacaaataaagcactggccgggcaccgtggctcacacctgtaatccctacactttgggaggctgaggcatgcagatcacctgaggtcaggagttctagactagcctggccaacatggtgaaaccccaactctattaatcacacaaaattagccaggtgcagtggtgtgcacctgtaatcccagctactcaggaggctgaggcaggagaatggcttgaactcgggaggcggaggttgtggtgagctgagatcacgccactgcactccagcttgggggcaacagagcaagactctgtggaagaagaagaagaagaagaagaaggagaaggagaaggagaaggagaaggagaaggagaaggagaaggagaaggagaaggagaaggagaaggagaaggagaaggagaaggagaaggagaaggagaaggagaaggagaaggagaaggagaaggagaaggagaaggaggagaagaaggagaagaaggagaagaaggagaagaaggagaagaagaaggagaaaagaagaggaagaagaggaagaagaagacaagaagaggaagaggaagaagaaaggaagaaggaaggagaagaagaggaggaggaagaaggagaaggaggaagaagaaggaagaaggtggaggaggaggaggaagaggaggaggaggaaaaacaatgtgggcattgggtacttgcatttggtctacgggaccattagcatcattgatcaactgagggctttttcctagagcaggcataacaaattgatttcatacataagccaacttggatcacctggtgatggctgttggaactggtgtgttgggaagaatcctgagggggcaaatggctaagcaggaaattgactcatgattgactagcaatgtctgccataggcttgggatggggaagaggtgacacgtatgttggcttcaagatcattgagaccatcttccccctcccctcaccaactcattttatagttgagaaaactgaggtccagggtgaccagcaacagatgcagaatccaggtcctggcttcctcagcactcccagcttatccctgacaccttgtccctcctttctccacaggctctgagcccaagtcatgtgtccagccttttgactctggagctgtggcttcagccaccaagagcagcagtggatcctggaaacctgagaacccagacttcttctctgccatgggggatgatcaggcaggtgtctgactgctgaaacgggcaggagctgatgacgacagtggcagcaagtacactttgtttagcacctgcattttaccaggcactttgtgtacattatctcagggaatcctcatcgaaacttgcaaagtcatttattatcctgttttacctatgaggaaaccagaatctgttctgaaataagaagagggaggaaaggagcaatggagggatgaatggatggatggatagatggatgggtgggtgggtgtctggatagatggatggatagatggaaggaaagaggaaatcaaggaaagatgagtagaaggatggatggatggatggatacgtggatgaatagaagggtggctgggtggatgaatggatgacggatgactagaaggaagggaggaaagatgggtagaagtgtgggtgaatggataaatggatgatgggtgaataaaaagaagaaagctagatggatagatggatggactgatggaaggaaggaggatggatgaaggaaggaaggaaagaaggaagtatggatggataggtagaaggatgggtggattaaaggaaggaaggagagatggttgatgaatgaaagagtagaaaggtgggtgaatggaaggaaggaagaaagatgagaaatgtgggtggatggatacatgaatgattgatgaataaaatgaaagatggaaggaaggaagatggatggatgaaaggaaagaggatggataaatgaaagaatgaaggaaggatggatggataatggatgggtgagtggatggatgagaagaaatgtgagtggaaggaaggaaggaagaaagatggatgggtgaaaggaaggaagatggctagattgatgaaaggaaggaggatggataaatgaaagaatgaaggaaggatggatggataatgggtgggtgaatggatggatgagaagaagggtgagtgaaaaggaaggaaaaaaggaagaaaggaaggaagggggatggatggatgggttgatggaaggaaggaggatggataaataaaagaatgaaggaaggatagataaataatgggtgggtgaatggatggatgagtagaagggtgagaggaaggaaggaaggaagatgggtggatgaaaggaaggaggatggataaatgaatgaatgaaggaaagatggatgggtaatggatggatgaatggatggatgagaagaagagtgagtggaaggaaggaagatggataaataaaagaataaaggaaggatggatggataacggatgggtgaatggatagatgagaagacgggtgagtggaaggaaggaaagaaggaaggaagtaaggaagatggatggatgggttgatggaaggaaggaggatggataaatgaaaggatgaaggaaggatggacggataatggaggggtaatggatagatgagaagaaggatgagaggaagaaaggaaggaaggagggaaggaaaggaaggaaggaaggaaggaaggaaggaaggaaggaaggcaggctgactaaaaccaaatacagcctagaaaggtagactgacttgcctaagttcccgtcatggcagagttgggattcaagcccattctgactctgcagcctgcgtccataccctctgctctcatcacactttctctaagcgcttatgtcaggggcctgtggggtaggccagcccccaggctccagtctcaaaagaaagaccctgaaagcttgtggtccctgggtggagttggggcacagttaacatcaagtcctgatggtgtgtggctgggactgaggtcgtggcaaaggtcctggtgacagcctccaggctgcttcagggaaggtctcctggggtggaagatgtggcatctaggaggtgcatccttaagagggtaggggccagggagaggtctcgtaaacatagttcagctccagctccaccagggaccaagacagtcaggtggtgtgtgttgggtctccaggaagcagactcagacggagttgggctgaaatgggcaagcttttatatccccttgtcaatcacccattgctgatgggctgcccaggaagggggctgagaactgacagttccttctcccacagcctcggaggatctgagtggttttccacaacatccgctacactaaggaaggaggatctgttacggttaagccataaagggcatcccatgtacccaggcttgtcattttatggaagaggacactgaggggctgggcatggtggctcgtgcctgtaatcacagcactttgggaggccgaggcgggcagatcacttgaggtcaggagtttgagaccagtctgggcaacatgcccagcacaggccagcctgagcaacggggtgaaaccctgtctctactaaaaatacaaaaattagctgcgcatggaggtgtgcacctgtagtcccaactactcgggagactggggcaagagaatcgcttgaacccaggaggtggggattgcagtgagccaagatcacaccattgcactccagcctgggtgacagaatgaggaaaaaagacactgagatgcaagcagtgaaggaattagtccagatgtcatggaaggtcccgggtaaaggatcacagaaccaggactggagtttagccctgcgccctccctgggatctggacctctttgaaagagaaccatgggatgcaggcagttggacaggtaacacggcaatgggggaacggtgggctctggggaagcaggcaggcctgtgagtaggcagcaaggctgtgcccccacccgctggcaaatctgccccctcttcctgagtctcgattctcatcatccactttgtcttcagagctggagaccagggcattttccttgtcccttcctctcccatcaggcaccaagtcctgtgaattttgaaccccaaggaccctccatttctgtgcattgcaccctccttctccttccctggtggtggtccccgtcatggctcccccaggtaatctgcacgggtgtcctggctgggccacctgcctgcatcttggccccatccaagcccatctctgctctgcaagctgaacacatatgtatttttttttgagacagggtctcactccatcacccaggctggagtgcagtggcacaatctcggctcactgcaacctccacctcccaggttcaagagattcttgtgcctcagcctcctgagtagctgagattacaggcacccaccaccacatccagctaatttttgtatttttagaagagatggggttttgccatgttggccaggctgttctcaaactcctggactcatgtgatccacccgcctcaggcctcctgaagtgctgggattacaggcgtgagccacggcgcccagccagcaagctgaataatctttctgaaggccaatcactgccctccctaccaccactattggaaacttccagattaaatccatgctttggccaaccagactcgtgttccccaacggtccacacctcagccataggaacatttgccatttgcttaaaggcgccatgagctctccagcctgcagacttctggatgtcctgttctttcactgcctgtaatgtgcttacctgcagtatctgcctagccagctcctactcagtcctcagaccttcacttgctgccatttcctccaggaagccctccctgatactttttggagagcgtaatctgttccccctcagatcttccccagcctgctggctggaaccttctatcattcttgactataacggtttggcttaatcatctatcttctccaattagctccatgaggacaggggagactgtgtgattccatttggggttgtcagaggcttgctcagaggaagggtcctgactcctgaaatttatttattttatgtaatttaattatttatttgtagagacggggtcttctctgtcacccaggttggagtgcagtggtgtgatcatagctcactgcaacctctgcctcctgaactcaagcaaccctcccacctcagtttccagagtagctgggactacaggtgcacgccaccacatccggctagttgttttttttttttaaagatgggatttcgctatgctgcccgggctggtctcaaacccctagtctcaactgatcctcctactttaacctcccaaagcactgggattacaggtgtgagccacggccctggccccctgactcctgaaatttaaaaacagcaatatattattctatccgccaaggtttgcattgcccaagcatctcatttcacctgcacaacacaatcctacaagtaggtggcagtatgcccattttagagatggaaaaaactgaggctcagagagctttaggtacttgatcgaggtcatgctaagctaacaacagttaccatagcaggatgcaaaccttgactgaggtctttttacccaatgaccatttgaaaaccatctgccctgtgaggcacggtggctcatgtctgtaattccagcactttgggaggccgaggtgggatggtcactttagcccaggatttcaagaccagcctgggcaacataacaagactctgtctctacaaaaaataaaaaaatactagctggggccgggcgtggtgactcacgcctgtaatcccagcactttgggaggctgaggcaggcagatcacctgaggtcaggagttcgagaccagtctggccaacatggtaaaacccgtctctactaaaaataaaaaaattagccaggtgtggtggtggacacctgtaatcccagctactcgggagactgaggcaggagactcacttgaacccaggaggtggaggttgcagtgagccaagatcgcaccattgcactccagcctaggcaacaagagtgaaactccatctcaaaaaaaaaaaaatatatatatatatacacatatatatattttatatatatatacacatatatatattttatatatatatacacatatatatattttatatatatatatacacatatatatttttatatatatatattttatatatattttttatatatatatattttatatatatatataaaagctgggcatggtagtgcagacctggaaagaaggaagaaaggaaagaaagagagagagagagagagagagagggagggagggagggagggcggaaggaaggaaggaaggaaggaaggagaagactatctgctctatgatttacttgccattttgtttgaaattaagccacttttttacatgacaaaatgggaccagggacacattatgctttggtgtgttatctttttccaacagacaacaagatcaataactatttacatttttaaaataagcatgtattcatgtactatgcaaaactgtgcgtggtgagcctttctgaagagtggggaaccctgggctgtttcacctctggatttgatgggggatcccatcccccaaggctcccccaggtctagggaacaggagcctggatttatagcatcctctttggggtgtcagggccagcagggcagcgtacgatgcttactcagatacctggaaagacccccactgggctggctctcatcttttcttgcccaagatatgtcagaacaaaggtgcaagctccaaaataaaagatgagacaccccctctctccctccctcaatgtacctaccagtgggagctggaacagcctgtactgcctggctccccactccccagctccacccccatctctggcctggctcccacctctgcctcctctgagggaggccagatgcaggagaaagagggaggctcagccaggccaagaggctgtcctgacgtgtttatatttacaggaggatgaaaaccagagacacaaaaaaaccttcgggggctgcgacagaaaagacagtaggaggttttccaggcactgggggtaggaatggagccatttggggggtaagtgggaatttgaaaggaggctgccgcccaagtcacatgagggccagccagagctagagctgtggctctttagaaagagactgaaaaagagggaccctggtgatcaaaaggcagagggaggaagaggacgcagaggaggagtcagcagggagaagggagggaaatgaggacggtggccacaaaggagagattcaagaaggcaggctgtggaaacagcagagtgagtccttaggaagttaaacctaaaattgaccaggcgcggcggctcatgcccgtaatcccagcactttgggaggccgaggcgggtgaatcatgaggtcaggagttcaagagcagcctggccaagatggtgaaaccgtgtctctactaaaaatacaaaattaggcgggtgcagtgactcacgcctgtaatcccagcagtttgggaggctgaggcggatggatcatctgaggtcgggggtttgagaccagcctgggcaacatggagaaaccctatctctactaaaaatacgaaattagctgggcgtggtggcacatgcctgtaatcccagctactcgggaggctgaggcaggagaatcgcttgaacccaggaggcagaggttgcagtgagctgagatcgggccattgcactccagcctaggcaacaagagtgaaactccgtctcaggaaaaaaaagaaaaaaaaaaggaaagaaagaaaggaaagttaaacctaaaattggctgggcacggtggctcatgcccgtaatcccagccctttgggaggctgaggcaggtgaatcatgaggtcaggagttcaagagcagcctggccaagatggtgaaactctgtctctactaaaaatacaaaaattagccgggcattgtggcaggcgcctgtaattccagctacttgggaggctgaggcaggagaattgtttgaacccgggaggcagatgtttcagtgagctgatactatgccattgcattccagcctgggcgacagagtgagactccatctcaaaaaaattaaaagaaagaaagaaagaaagttaaacctaaaattgccatgcaattgtgccactgcactccagcccaggagacagagcgagatgccgtctcaaaaaataaaataaattagtttgggcgcagcggctcacgcttgtaaccccagcactttcggaggctgagcggggaggatcatctgaaatcaggaatttcagaccagcctcggcaacatgatgaaaccgtgtctctactgaaaatagaaaaatcagccgggcatggtggtgcacacctgtaatcccaactactcaggagggtgaggcacgagaatcacttgaacccaggaggcagaggttgcagtgagccgagatggtgccactccactccagcctgggtgacagagcaagactctgtctcaaaaagtaaaaaataggggctgggcgcggtggctcacgcctgtaatcccagcactttgggaggccaaagcgggtggatcacgaggtcaggagatcgagaccatcctggctaacacagggaaactccatctctactaaaaatacaaaaaaattagccgggcgtggtggcgggggcctgtagtcccagctactcgggaggctgaggcaggagaatggcgtgaacccgggaggtggagcttgcagtgagctgagattgcaccactgcactccagcctgggcaacagagtgagactccatctcaaaaaataataaataaataaaataaataaataaatgtaaaaataaaattaccatatgatcccgcaattccacttctgggtatcttcccagaagaactgagagcaaggacccacagatatctgcacactgatgttgatagcagcgttattcacaagagccaacagatggaaagagcccaggtgtctgctgatggatggatgaataaatgcgatgtgatccatccacacaatggaatacaattcaaccttaaaaaggaaggaaattctgacacatgctgcaacgtggaggaatcttgaggacgttatgctcggtgaaataaaccagacacaaaaggataaatactgtctgattccactcgtaggaggtctctggactcgtcgggttcatagatttaccacaccccgctttttttttttctttctttctttctttggagacagggtcttgctttgtcacccaggctggagtgcgatagcatgatcacagctcacttcagctttgacctcccaggttcaagtgatcctcccacctcagcctcccatgtagctgggactacaggagcctcccaccatgcccagctcacttttaaatttttttgtagagatagggtcttgttatgttgtccaggcgggtctcaaactcctgggctcaagcgatcctcccagattgctgggattccaaggcatgagccaccacgccaggcctggtcagattcatggagacagaaagtagaaaggtgggtgccaggggctgggaggggaatgaggaggctgtgtttcatgggaacagaattttaatttgggaagatgagaaagttctggagatagatggaggtgatggttgcacagcaatgggaatgtgcttaatgatactgaactggacactgaaaaatggttaagatgtgggcccgggtacagtggctcacgcctgtaatcccaacactttgggaggctgaggcaggaggatcacttgaagctaggagtttaagaccatcctggccaacattgtgaaaccccgtctctaataaaaaatatataaaaattcaccaggagtggtggcacatgtctgtagccccagcatcttgggaggccgaggcagttgaattgcctgtggtcaggagttcgagaccaacccggccaacattgtgaaacaccatctccactaaaaatacaaaaattagccggacataatggtgggtgcctgtaatcccagctactcaggaggctgaggcagaagaatcacttgaacccgggaggtgaaggttgcagtgagctgagattgtaccactgcactccagcctgggcgacagagcaagactccatctcaaaaaaaaaaaaggttacgatgataaatgttatgtgatgtgtatttcactggaataaaaagaagggaggggccaaatctataaagacatcaacatgggtgagttctgggtaaagggcaaaccctgcgtagctcctccttcctcatcccaagacaagtgtggacactggccccttgcctcctgccggcaaagatccccagctgacaaattgagagcatccaccaagggctgcctgagatcacatggatgcctggagccacatctcagcactggcctcgcatggagccatgggggaagcccactcgcccacctacccaccaaaccctgtgtgcagacagtcctaacaaatgcctggaaaaggacaattcctgtcctgcagatcctgacagcccagaggaagggcaccttaccaaccttgaggagtcaggaaggcaacctggagggcatgcccaagctgggttttgacggttgcataggagttcaccagacagactcaggatgggccgggtgggagaggaggttttgcaagaagaaaaggcaggtgccctggctggacagaatgacaaatacaatgactgggaggagaagagggaagtgaaggacaaaagaagggaaggacaaagaaataggaacaggagcagaaactgtaccaaaaagaaaaaaaaaaagagagagagataatcagatggaaactcagtgacgagaagtgctttgccaaggctagaagtaggggaatctggcatggaagaccagacttctggtccttttgtgggggtgagctcttgaaggtccaggttagacaggggactgggggactactccctcccattccatcccacccgctgtgaggagggcgctgagcccaggagggacaggtaggggacaggcagggtctggatgttgggagcagggaccttgtggtcaagagaccccaggttctgctgccccttggtcaatgtcttcttctccctcctcaccttcccaacctacaggaggatgattttcccaggcggctcagcgagagtatggaggacctcagcctggatttgggggcccttcagggcagcgagtatctgcaggacctgggccttggggccccttcccacagccagcctggggagaccccagacagccgccccaccggtgaagaaccaggaagagattctcttttctccagcttggcagggtcccaagacctgtcaaggcggcgcagctgggaaaggtcgcggagctgctcagagagctggcggaggtcagttccccactgctgcctgcttcccacaatgcacccctgggacagggaagaggtccagaaggccagagccaggtcctaagacaagccaccccttgcacctgccgtggtccccaacctttttggtaccagggaccagtttcatggaagacaatttttccatggacccagggggacaggggatactttctggacaattcaagcacattccatttatcgtgcactttatttatattacgttgtaatacataatgaaataattatacaattcatcatcatgtagaatcagtgggagccccgagcttgttttcctgcactagacagtccattctgggggtgatgggagacagtgacagatcatcaggcactagattctcttgtttttgtgtttgtttttttttttttgtttttgttttttttttgagatggagtctcactccattgcccaggctggagtgcagtggcgtgatctcggctcactgcaatctccgcctcctgggttcaagcgattctcctgcctcagcctcccgagtagctgggattacaggcacgcaccaccacacccggctaatgtttgtatttttagtagagacggggtttcaccatgttggtcaggctggtctcgaactcctgacttcatgatctgcctgcctcagcctcccaaagtgctgggattacaggtgtgagccaccgcacccagcctagattctcataaggagtgtgcaacctagatccctcgcatgtgccgttcacaatacagttcccgctcctatgagaatttttttttttttttttttgagacagaatctcactctgttgcccaggctacaggctcacaccaccacacccggctaattttttgtatttttagtagagatggagttttaccatgttggccagactagtctcaaactcctgacctcaggagatcctcccgccttggcctcccaagtgctgacatgacaggcatgagtcaccatgccgggcccctgctcctttgataatctaatgctgccactcatatgacaggaggtggagctcaggcagtcatgtgagcaatggggagtggctgtaaatacagatgaagcttcgctcacatgcctgcgctcaccttctgctttgcagcccggattctaaaaggtcacagactagtaccagtctgtggcccaggagttggggatccctgctctagggccatgaggggcgtctgcaccatcagaggcagcccaaaaaaccctcttctaacttgcacatgcatgaacatagagcctgtgcaagtgaccgagcatgcatgcacaagcccaaactgaaaactgcatgtgaggccgggcgcggtggctcacacctataatcccagcactttgggaggccaaggcgggtggatcacctgaggtcaggagtttaagaccagccatggtcaacatggcaaaaccccctgtctactaaaaatacaaaaattagccaggtgtggtagtgcacacctgtagtcccagctactcggtaggctgaggcccgagaatcgcttgaacccaggagacagaggttgcagtgagccaagtttatgccactgcactccagcctgggcgacagagcgagactctgtctcaaaaaaaaaggaagaaaaaaaaatcgactgcatgcacacactgcaagcacacaaaaacctaaatttacacacctgctgagagtacggccacgatcagcacccatcagacccacgcatataagcttaaacgtgatctgcatactgcttgcatgcatacgcatgaagccaccatgcagttatgatcagaacggaaatgtgtgagacaccatgcaccccacagtggcagcaccaaatagtagaggcagggggtgctctagccacccctaacccgtgtccctcaaccccttccaagtcatcccacatagaaattcaggccgggtgcagtggctcacgcctgtaatcccagcactttgggaggcagagtcgggcggatcacttgaggtgaggagttcgagatcagcctggctaatgtggtgaaaccctgtctgtactaaaaatacaaaaattagctgggcatggtggcacgtgcctgtaatcccagctatttgggaggctgagggaggagaatcgtttgaacctgggaggcggaggttgcagtgagctgcgatcgtgccactgcactccagcctgggtgacagagtgagactctgtctcaaaaaaaaaaaaagaaagaaaagaaagaaagaaaagaaagaaaaagaaagaaagaaagaaaaggaagaaagaaaaagaaagaaaaggaaggaaggaaggaaggaagaaagaaaaggaaggaaggaagaaaggaaggaagaaaaggaaggaagaaaggaaggaagaaaagaaaagaaagaaaagaaagagaaaaccagtctgtgcaaaaacgatctgagatgcaaatgtagctccaacaaatctaaccaggctggctttctttgtcctctcccccttgccacccactcctctcatattgggaggtctggacccctttctgtggcttgcgcacccttccttgtcctggaagggcccccttgcatgttctttcaagcccccctggatgcctggggcagcagccaggtgggcaagacctgctgaagccccagtaccctgtcttctccactaggctcagcctcgatgcctcagctgtggatgaggaaccctgtctcccccgaacactggccagccttgctttgaacctgccaggaggagggctgaagacctggactcaagggtgtctctctgggggcgggacccccgcagagagcccaggcaaggtgggtataacctgcagccacccctgacaatagcacacttttgggtttagaaagcagtgctataggtaggaaggagagacttgccagggctggtggcgcttacccaccatggcagggtggaggctgcttatctgtggtgtggcccgtgcctcagttgtctctgggtcctaggattccagcctaggcctgaagggatttccctgggtaagcatctggggcaggccatgcatggccatgactccaacccaagggctggagacaaggggatgggggatgtcttatcttgcagtttcagccaggcttggaggatctttgcctggagtgtagccctgcagccggaaggcagctgtgtctgtggttggggtatgcagctacagctaaggagaatttgtgtctgacctgagatcccagctcacacctgaggaatgcatgcttggagctgtggctggtggctgagacatctttggctgtgatcacaaaggaccctgggggaaattcctggccattgttggaagctgtggctctgatacctggggctccagctcagagctggaggctcctccgccaggactacagccctgtggctggggagggggtggctgaacccatgtcttatggctggggggagtggctggaggctgaggcttggatgagtgtgtcaccccatttctgtggaggtggccctggctgtgggttgggcccctcaatccagggaacctgcctgcagtccaggctgccttcccagcttagtgagatgtttaatcccctgcaggaatgtgacagccccaagaaaagagggaggtcaaggtccgttcctgtgtccttctatgagatccgctctccggaaatctctccgggtttggaagtgcccactccacctgttcaaggtagccagcctgggagtttccttcattcaaaccaagtcagggaaagaggagcctggccaacatggtgaaaccctgttggggtttcatccttcatcctggagggtccccttggtggggctccagatgggccccagggaagggaagggagctggcttagggtcccctgggcagggactgagcagaacgctgggggaagccagagaggggaagggacctccagcatctgtccctcctcctctccctgcagctcttgagccagtgtgagattgccccattgcaatgagcttgtccccaagattctctcttctctctatgactcttttttttttttgagatagagtcttgctctgtcgcccaggctgcagtgcagtggtgcaatctcagttcactgcaacctccgcctcccgggttcatgcccttctccggcctcagcctcccaagtagctgggactacaagcacccgctaccatgcccggctaatttttgtatttttagtagacacagggtttcgccatgttggccaggctggtctcaaagtcctggcctctagtgatcggcccgcctcaacctcccaaagttctgagattacaggcatgaaccaccgcgcccagcattctgactatttctttatctctttctttatctctgaatttttatcctgagatcttgcacctctctggcatcagacaaacctggagtctaaacacataacaagtctctgagcctctgtggcttcctctattagaacaggtgcagcagctcacacctggaatcccagcaccttgggaggctgaggcaggtgaataacttgagcccaggagtttgaggccagcctgggcaacatggcgaaaccttgtctctactaaaaatacaaaaaacaattagccaggcatgacggtgtgcacctgtagtcccagctactttggaggctgagatgggaggatcacttaaacccaggaggtcaaggctgcagtgagttctgatggcaggactgcgctccgctctgggtgacagagtgaaaccgtctcaaaaaaaaaaaaaaaaaggcctggtgcggtggctcacgcctgtaatcctagcactttgggaggccgaggcaggtggatcacctgaggtccagagttcgagaccaccctggccaacatggtgaaaccccgtctctactaaaaatataaaaacgcaagaattagtcgggcatggtggtgtgcgcctgtaatcccagctactcgggaggctgagacaggagacttgcttgaacccaggaggcggaggttgcagtgagctgagattgagccattgcactccagccagggtgacagagcgagactgtgtctaaggaaaaaaaggggaggggggacaataagcgtatctccttcaggccacttggagagtctgctgatctcacacacgtaaagcacttagtaggttgtaagcactcacgagacactggggacacctgcgtttgtccctggctctctgtcctcttctcgtctctgttgcctgagagtacaggccctgtctgcatggcctccagttctgcaggggcccagggtggcatccgggagggctctgctgggctggtcctgtcccagagctcctgacaactgtgcttcctgggatggggggcttcttccaggcctggaacctccagtgctggagtgcatggaaaaagaccatgtggaaccagatcacgtgtgagtttctgcctcgtggtgggggagggacccccagggaacaggccacaaagtcagggctgcgggaggagggctgccagggtgcagtgttgctggccataagtgaccagggccagacaccatcccactagtccccccataacctcatctttctgccaccatccttctcccggtgggagggacccaggcccctcagaaaggttctcaatgtagccttgggagacaattgtggcttttttttttttttttttttttttttgagatagggtctcactctgtcacccaggctggagtacagtggcgtgatctcagctcactgcagcctctgccccctgggttcaagtgattctcctgcctcagcctccagagtaactgggactacaggcgcccgccaccacgcccggctaatttttgtatttctagtacagacggggtttcaccatgttggccaggctggtctcgaacccctgacctcaggtgatccgcccaccttggcctcccaaagtactgggattacaggcgtgagccactgtgcccggctgactgtggctttgagtagggtctgcatcaggacctgaggcctgcttgggcaaccccagcttatctaggggagagtgtctgtaacctggagctaccatgggctgttctaatcccacctccacccccacaggctgattgtccagcaggtgcttcaagaacttcgacagtaccatgggtaagtgggaatcgggacaggcttgaggggagcaaagtgggagacaaaagcaggaagcatgcaggggtgtgcacaggtgtaggagacaggggtagagaagactgggtgagggctgggtacagtggctcacgcctgtaatcccagcactttgggaggctgaggcaggcagatcacctgaggtcaggagttcgagaccagcctggccaacatggcgaaacctcgtctctactcaaaatacaaaaattagccaggcgtggtggcacgcacctgtaatcccagctactcaggaggctgaggcaggagaattgattgaacccaggagttggaggttgcagtgagctgagactgcaccattgtactccagcctgggcaacacagtgaaactctgtctcaaaaaaatagaaaaaagacaaggctgggttcaagggaagaaaaatggggcagaagaggagggaggaggatagaagacaagagttggagaggagcaggctgccactggcataggggttccttggagcaaacaggtgaaggtgcctcctgcctaagacactgccatctgttacaaaatcttcctgtagctggatgtggtggctcataccactgtaatcccaacactttgggaggccaaggtgagaggatcatttggaggccacgagtttgagaccagcttgggaaagatagtgagaccctgtctctacaaaaaacatttaaaaatttgctgggcgaggtggctcatgcctatgatcccagcaatttgggaggctgaggtgggaggattgtttgagcccaggagtttgagaccagcctgggcaacagagtgagactctgtctgtataattttttttttttgattagctgggcgtggtggcacatacctgtagtccccagctactctggggggtgtgggggtgttgacgcaggaggatggctgagtccaggcagtgaaggctgccatgagccatgattatgccactgcacaccagcctgagcaacagagcaaaaccctgtttaaaaaaaaaaaaaaattgtgggctgggcgcagtggctcacacctgtaatcccagcactttgggaggccaaggcgggcggatcacgaggtcaggagatcgagaccatcctgactaacatggtgaaaccccgtctctactaaaaaatacaaaaaattagctgggcatggtggcaggcgcctgtagtcccagctactcaggaggctgaggcaggagaatggcgtgaacccaggaggcggagcttgcagtgagccgagatcgcaccaccacactccagcctgggtgacagagcgagactccatctcaaaaaaaaaaaaaactgtgtaagatttaagtacttggttaaaaaaaaaattaaaaattagccaggcatggtggcacatgcctatagtcccagctactcaggagactgaggcgggaggattgctcaagccccggaggtcgaggctgcagtgagctgtgattgtaccactgcactccagcctgggcaacagagggagacgccatctctattaaaaaagaaaaaaaacatcttcctgctacactgattttgtttagccaagacacattactgccctctgctggaaaacctgtcataatgtctcatatacaagcccagagtgtcaaggacaggtgggctcttagacggggtacctggtgtatgcctgtactcggtagcactggggtaggtgagtgggagaagaggctgccgacccaggtatctgtcccctctgatcctgcagggcccggcagagggcttgcatgtcagccagccccggaggagcccactcgaacctgacctggtttgaattcctgtcggagtaagtacacagatctgcttctggggagggcagccttggattcgaacaagtgtttacagatggtcctttgggccagaccccccatgctgggggcaggagctggagcccccatcagggcaatggtgggagctggcaggaaagggagggatgaggctcccgtataccctgagaggacagaggaagacttcctggaggaggtgacgatgtaagcagggttctgacggaagagtaggagtttgccaatacgtgcagataaggatgaaggaaaaaaaaagaaactagaaggcttagggaatgacatcggagtggggctgggaggagggaaggtgggagaaatcagcagagaccagaccacctcagctacacaaaggcgctcacactttatccgaaacagcagtggggcttgggtgcggtggctcacgcctataatcccagcactttgggaggccgaggagggtggatcatctgaggtcaggagttcaagaccagcctggccaacatggtgaaacccaatctctactaaaaatacaaaaattagccggatgtggtggcgggtgcctgtaatcccagctactcacgaggctgaggcaggacaatcacttgaacccaggaggcggaggttgcagtgagccaagatcacgcccttgcactccagcctgggcaacagagtgaaactccgtctcaaaaataaataaataataaataaataaataaataaataaataaataaaaataaaaagagcagtggggcctttgagcattatcagttctggtgataggatggggacagtatgaggaccacagacagggctggaggtccctgaatccctctctctccctcctttcctccctccctctctcactcactcattcattcaagaaacatttatggatatttacaaagttccagaagccactcggactgggatctgggggcacagactggaggaatggcgtctccgcccaggaaatagaccctaccagagcaggaatcatgtctgccttatatgtcactgacctaatatttattaaatgaaggtgtgcctgaaatccaggaaaccatgccagtgacctggggatggagtttggggtgggggaggagatagaagaatgagcaggatttaaagaccaattagggccgggcgtggtggctcatgcctgtaatcccagcattttgggaagctgaggcagatggatcacctaagcctggccaacacggtgaaaccccacctctactaaaaatacaaaacaattagctgggcacagtggcacacacctgtggtcccagctactcgggaggctgaggcatgagaatcgcttgaacctggaggcagaggctgcagtgagccgagattgcaccactgcactccagcctgggtgacagagtgagactctgtctcaaaataaataacaaaataactaaataaataaataaataaaggccaattagataccgggtgggggtggggggcgtgaattagagggagaaatcataagtgaacagagctgaaattcccagcccaggcattgagggacctcaaacctgagatcacgttgcatttccctctgtaaacccagtccccaaagctcttgcaaacattcattcatgtctgctgagtgaataagtaagacagggaaggagggagggaaggaggaagtcaagggccagggaaggggtaaggcaggaccaggaggccacagggagacaggttgcaggtggattcctgaagcaacccacagggctgcctcagaatggcccctggccccctctagtggaccttccctctcgtccctcaggagcgaggacggtgctggcaagaacgagaagagtgacaagagtaccagtgtgaagcgcaggctgagctgcctccgcagtcgagtgaccaggcagaaggagaaggtaaggggagctaagccacgggggccctcctctgccttccccagcttggcttgctgcccttagcccgggagccctgtgactggggctggtggtgggctgggtacacagtatataagagggccagtgcctgcagagggcatcctgagacccacctctgtcccatccaggggaagagcccagcacatctgaaggacaagggccaggatgcacgagagaggcgggagtgtgtcaatgggcaccagctgttgcaagggaccttctccggcccctccagctgccccctgtgtggcaaacctttcttgagctcaggtaagtctggtggcccaatccatcctcctggagggcagccactttctcttcttcacgtcctttcaatcatactcctggggtctcttttgatgtgtgcatcctcgttctgttttgccctctcctcggcggctccctggagagaaccagggatcagtccctgggcacagggacccttgggctaactcgggactggcaacagtccctttaagtctcagcttttgcgattgtgggaatcctcctgcagcatctggacttgagccgtgtatgagtttgctagggctgtcatgacaaagtaccatgcaccaggtggcttaaccatcagagatatattcccttgcacttctgggggcttaaagtctgagatcaagggctaagcttcatatgaaggtgccaggaaatgatccattccaggcgtctctcctggcttcatcccttagcctcacatggccctgtctgtgtcccagtttcccctttctataaggataccagccatattggattaggggcccaccacactccagtgtggcctcagcttagcttatttacatccatgaagactctattttcaaataaggtcgcatcctaaaggacagaagtgggggagtaggattgcaacacatgaatttgatgggtggggggaggggcatacaattttatccatagcaggtcgttttctgcttcctggggcacttggtggttgtggggtggtgagggaaagagtctctactcgagaaaaagtaccagattcaagagactcccagaaagagatggctctggtcattgccgggatttagaactttgtctttttgcaaataagctccacgttggagggaatgaagaggaggaggtggtggcaactgcgtgttagaaaagatgcgtgcgccgtttgtaaccgaatccaaactgcagtctgtggctggcagaactcaggctagttcacagtttctgggccttagcactgtcaacatttggggccaggtgattctttgttctaaggggctatcctgtgcattgtaggatatttagtagcatccctggccttcaccctctaaatgctggtagtaaccacctcctgcctccagttgcaacaatcaaaaatgtctccagacatggccaaaagtctcctggggggcagaatttcctccagacaggaatcaatgggtgaatgagatgggcaaacagatcctagatgggcttagaccctgcagtgagagaacatctccacccccggggcaagtgcctctgagcaacgtgccttgcaggttttgcatttgttggctttacctgcttcaggcgtgggaattttccttctttctcattttcctctctttctgcagtgccattgctggccatggggctgggggtggctgttggtggctagtggtgtcaacgatgttcctctttgagctccctctgttaggcaatccccatccagctctgtgacccatgagctgtcctcagcagaggctggcatgagctttttgcaaaatttttttttttttttttgcgacagggtctcactctgttgcccaggctggagtgcaatggtgtgatctcagcatactgtagcctctttctcctgggctcaagcaatcctcccacctcctcctcccgagtagctgggtctacaggtgtgcaccaccatgcttggctaagttattaacttatttttgtagagacaaggtctcactatattgcccaggctgctttcaaactcctggactcaagcgatcctcccgcctcagcctcccaaagtgctggaattataggtgtgagccacctcacccagcctttgccaaatcttcagtgcaccaacaaagtcagtgtgttgaagtccttaatttgggacagcaggtgactccctcttttccctggcaccttgttctcttctgcaggggatgagctgtgctcagtctatcttaggcatcagatgcaaggggcagatagaaggttggaagttggaagagtaaagccagaggtctagaaccaagactgcacagagcaggcgctgggagcctgccctcggatacccttccttgaacagctccaggctgagctgaaccatgcacttccttctgtgattgctggttccttatcattctccatttgtttctgttcctgcttttgctttgcttctcagaaaaatcctgaggtctttaaactctgatttggggtcacccaaggtcttgtatgtccatgtggcccactgacttagagcgtcgccgtcatctgggaacttcattattattattattattattattattattattattattattattattttgagacggagtcccactctgtcacccaggctggagtgcagtggcacgatcatagctcactgcaactctcacctcccaggttcaagcgattctcctgccccagcctcccgagtagcggggattacaggtgcccaccaccacgcccagctaatttttgtatttttagtagaaacagggtttcaccatgttggccaggctggtcttaaactcctgacctcaagtgatttgcctgccttggcctcccaaagtgctgggattacaggcgtgagccaccgcgcctggcctgtcacctgggaactttttcaaaatttctattttagagataggatctatctctctctatctctctctctctctctctctctctctctctctctctcccccctccctctctccctccctccctctctctctccctctctccctctctctctctctctctctccccctctccctctctctctctccctccccctctctccctctctccctctctctctctctccctctctctttctctctctctccctctccctctctccctctctctctctcctccccgccacccccggggctggagtgcagtggtgtgatcataactcactgcagccttgaaatcctcggcttaaggaatcctcccacctcagcctcacaaatacctgggaccacatgcatatataaccacaccctgctcatttttaacattttcgtttgtttgtagagacgggctcttgctatgttgcaaaaaaaaaaaaaaaaagacaaaggaaaaacatgaagttagaaaaggagacagagtgattacagagtttgtcaacctcagcactactgacatttggggctgtggtgtggggccgccctgtgcctgggaggaggttgaaaagcatccatcgtcttcacccacttggtggcaggagcgcctctagctatgatgaccaagttgccacgtgtcctctagtggcagggtaggaatgcagtcacccccaggtgaggaccacggctctccctcaagtgtccagggatagcctctccgaattggtgacattggaatccagatgtggaggaggtgggaaaagggccctgtggataggtagggaagagtattccaggtcgtaggtggaaaggtcccagggcaggaatgtgccccgggcagcagaaaggccagtgtgcttgaagtggaggtagaagaggtctgtcggaacctgttgcaggtcacacaaatgtgcatgcctgcccccatctgagccattgctcagaggaccctgtcacttgtcactcgatagctgagcttgctgtctgcaaatcccacctccacctagactcctatcagggcagacaggcttcagtggcccctgtgtgagcctggaagttcccattgctgcttcggatcccttctccactctgggcgctgcaaagacagttcctgccttccagctggggatttgggcgggacagcgtccagcacctccttatgagctttcagtccccctgaagttgtatgccacatctgctgtgtccctgcgtttttctggaggagcagagcagctagggttttcatcagatctccaaccagaacatgcgaccttggaaaagttcggcaacaattttctaagccagggactggcaaactgcagtccatcacctgtttttgttgttgttgttgtttgtttgtttgttttgagatggagtctcactctgttgcccaggctggagtacggtggcgcgatctcagctcactgcaagctctgccttcctggttcatgccattctcctgcctcagccttccaagtagctgggactacaggtgcccgccaccatgcccggctaattttttgtatttttagtagagacggggtttcaccgtgttaaccaggataatctcgatctcctgacctcgtgatctgcccgtctcggtctcccaaagtgctgggattataggcgtgagccaccgcgcccagcgctgttttttgttttttgagtttttttgtttgtttgcatacgctgaaagctaagaatggggtgggttttttacatttgtaaatggttgaaaacaaatatttggtgacacacaaccattctatgaaatttgcattttacagtctgcaaataaggttttgtggcaggacagctcgcctgttcatttatgtatcaccttcggtggttcccaagctacatctttgcttttggttttgttctgagacagaatctcgctctgtcgcccacgccagagtgcagtggcgtgatgtcggctcactggagactccgcctcccaggttcaagcgattctcacgcctcagcctcccgagtggctgggattacaggtacctgccaccatgcctggctaattttttttagtagagacggggtttcaccatgttagccaggctggtctcaaactcctgacctcaagtgatacacccacctcagcctcccaaagtgctgagattataggcatgagccaccgtgtctggctcaagctacatttctggttggcagagttgagtttgcagcattacaaagcaagtttgccaacccctgaacgaggttatctggtagcaagcaaggtgagtggcttatcatgtcctgcaaatcaataaaccccttacaaaaaaatgaccttgagcaatgagagttccaacagcgtctaatttcctgaatgtcactttataatcacagaaaactttgcacaaataataacaatggttagcattaccgtatggagcacttacactatcccaagcactgtaagtgctttattttgtttttatttagattttttaaaaatagagacaaggtcttgctatgttgtccaggctggtctcgaactcctggcctcaggtgatcctcccacctatgcctcccaaagtgctgggattactggtatgaactactgagcccggtctgtaagtgctctaaaccgatttcctcattcagctttgtaactctgtagacactagcactttctctctttcacagatgaggaaactgaggcccagagaagttaagtttttgctcaagtcagggtttgaactcacagcctgagcccccgatcaccaatccattggcatatgatgcccttttatttttatttttatttatttattttcagatggagttttgctctgtcacccaggctggagagcagttggcaccatcccagctcactgcaacctccgcctcccaggttcaagccattctcctgcctcagcctcctgagtagctgggattgcaggcatgcgccaccacgcctggctaatttttgtatttttagtagagatggggtttcaccatgttggccaggctggtctcaaactcctgacctcaggtgatccacccccctcagccttccaaaatgctaggattacaggcatgagccaccgcgcctggcctgccctttgatttttaaaaaatatacttttaattttatatttacaggaaagtacaaagaaagcagagagagtccctttaagccctccttcccagcttctcctcatgttatttttaatttttttgagacagagtctcactctgttgcccaggctggagtgcggtggcacgatcacagcttactgcagcctcgacttcttgggctcaagagatcctcccacttcagcctcccgagtagcagggactacagtctcgtagcaccacaccaggctaattttttttttttttttgagacagagtctcgctctgttgcccaggctggggtgcagtggcgtgatcttggttcactacaacctctgcctcctgggctcaagcaatcctcccaccctagcctcccaagtagctgggactagaagtgcatgccatcataccaggataatttttttttttttttttttttttgtagaaacagggttttgtcacattgcccaagttggtcttgaactcctgggctcaagcgatccacccacctcagcctcccaaagtgctgggattacaggtgtgagccactgcatccaccctacattttcttccttccttccttccttcttccttcctcccttccttccttccttcctttctttctttcttatttacttatttttttttttttgagatggagtcttgctgtgtcacccaggctggagtgcagtggcacaatcttggctcactgcaacctccacctcctgggttcaagctactctcctgtctcagcctcccgagtagctgggattacaggcgtatgccaccatgcctggctaattttttgtatttttagtagagacagggtttcgccgtgttggccaggctggtctcgaactcctggcctcaagcgatccgcccacgagtcgtgacatccagcccactctcagggtggtgggaattaagctctttctcctggagacatcatttgattttgatttgcaggacaaccctttgaggtcaagaaagatttgagtttgtgtgaaagaaatgatgtggggccgggcgcggaagctcactcctgtaatctcagcgctttgggaggctgaggcaggaggatcccttgagttcaggagtctgggcaatatagtgagaccctcgtctctacaaaaaaaatgtttaaaagttagccaggtgtggtggcactcgcctataatcctagctactcgggaggctgaggtggcagcattgcttgagcccaggtgttcaaagctacagttagctatgatttgccactgccctctagcctgtgccacagagcaagaccctgttcctaaaaagaaaaaagaaataatgtgggtaaaggctgggcgtggtggcttacacctgtaatcccagcactttgggagaccaaggtgggaggatcacttgaggtcaggagtttgagaccagcctggccaacatggtaagaccccatctccattaaaaacacaaaacaattagcggggcatggtggcacatgcctgtaatcgcagttactcaggaggctcaggtgggaggatcccttgaacccaagaggtggaggttgcagtgaggcaagattgcgccactgcacttcagcctgggtgacagagcgagactctgtatcaaaaaaaaaaaaaaaagaaaaaagaaaagaaaagaaaagaaagaaaaatgatgtgggtagcactcacttagcatgatgtctggtacacacgggcaatggtatcttgtatcatcatcatcatcctcttcattttttgttattgtcatttaaagtctttcagccagtaagcggcaaagctagcatttaaatcatagacgcttgcctctgcaaagctgcaaaaacaaataaaaataataataaatcacagaccaagccaggtgtggtggcttacgcctgtaatcctagcactttgggaggccgaggagggaagatcacgaggtcaagagagggagaccatcctggccaacatggtgaaacaccgtctctactaaaaatacaaaaattagctgggtgtggtggcgcctgcctgtagtcccagctacttgggagactgaggcaggagaatcacttgaacccgggaagcagaggttgcagtgagctgagatcacaccactgcactccagcccgttgacagagtgagactctgtctcaaaaaaataaataaataaaataaaaataaaaaaataaatcacagaccctaaccctgttctctgacaacaaacccctccccacctgtgtcaggaggcatgaaggggccaaaacacccatgtctcattcccagcaggctgagaaaagtcctcccaaggtataactccccacaggcctacctgcttttaaaggtattcaaagtcaacgtgacagtctgtcccgtttcctcccgtccgtgggacagacggaggaaacagcctcacagtaagttaaacaaacagaacagagaatgagtcatactccaggtaattagagaaggtgggtctccacgataaagttgggatgcttttcagagaacagacaccacgccagacagtcctgttcctggccttgacctttgaggctgtttataattcaaccccacctatccctccacgcttctctcccactactcaggttctccggactccacggcccagtcaccctgaagtctcatggctgttcatacacgtcatacacatacgctgtgccttgctcatccagcgctgttcctggaactccctctcccacctaactcttactcatccttttaagacaaagcccaggcccacttcctccaggaagtcggaattaggctggataagtgtctgaatgtctcttaggccagttgctctcagccaaggaaacatctggaggcatttttttcaggaccaggggagccactggcatctaggaggtagagaccagggatgccgctcaacaccctccagtgcataggagaccacccctgccaccaccaccgagaattatccagccctaattgtcgaaagtgccaagctgagaaaaccctgctctgggcctaagctccttgcatctccttagctcctagcgcccctggtccatgctaaagactcataaatgaggccaggtgtggtggctcacgcctgtaatcccagcactttgggaggctgaggcaggcagatcacctaaggtcaggagttcaagaccagcctggccaacatggtaaaaccccatctctacaaaaaatacaaaaattagccagatgtagtggcgggtgcctgcaatcccagctactcgggaggctgaggcaggagaattgcttcaatctgggaggtggagtttgcagtgagccaagatggcaccactgcactccagcttgggcaacagagtgagactccgtctcaaaaaaaaaaaaaaaaaaaaagactcataaatgcagaatggttggatggataaaagaaagatgggagatgtttctccttcctagttgtctctgagaaagttggtttctatgtttaggggagggctgtgtccacctgaagtttcctataaccaagatagctatagaaataaggctgatggccagacccagtggctcacgcctgtaatcccagcactttgggaggccagggtgggaggatcacttgaggtcaggagttcaagaccagtctggccaacatggtgaaaccctgactctactgaaaaaaaaacaaaaaaaaaacacaaaaattagccaggcttggtggtgcatacctgtaattccagcactcgggaggctgaggcaggaggatcacttgaacccaggaggtggaggctgcagtgagcctagatggtaccactacactgcagcctgggtgacagagtgagactctgtctcaagaaagaaaaaaaaaaaaaaagaaagaaaaagagaaagaaagaaataaggttcaaaggccgggcatgatggctcacacctacaatcctggcatcataggaggcccaggcgggcagatcacttgagctcaggagttcgagaccaatctaggcaacatggcgaaactctgtctctacaaaaaaattagccagacgtggtggtgtgtgcctgtggtcccagctacttgggaggctgaggtgggaggacaacttgagcccaggagatggaagctgcaatgagctatgattgtgccactgcacttccagcctaagtgacagagtgagatcctgtctcaaaaaaaaaaaaaaaaaaaaaaaaaggaaaaaaaataaggttcatgcccctaagtccataagccacagctacacagctgcccaaccattgagccctcataaactcccgtgttagagtttctgacctcagctgcagtagggtgcctggtgaattacgtcttgcatttctgggacatccaattccctgaacatgctcccttcctctggaccatgaaggttggacttgaactgaaggctagtccacctggggacgcaaccctccagcttctgaactggggactctcaacaacatattgtgcatgttttgaagtgattgggtttggggaaatctttttttctaaaatagagactgggtcatgcgaggtttcccaggctgatctcaaagctcctggactcaagtgatcctccctcctcagactcccaaagtgttaggattacaggcatgagccgtcttgcctggccatggggagatcttctaggcctggctgaccagccaaccttggtgagagctgttctgctcgactcctggttactgttcaactgcctcccctgtggcaggacttggattagacaggcaacctcaagactggggtgtctgatggcaattgagaggttgctggtgctgggggaagcatctggcctatccacatctgccaaatagcacctgtgtggaagtggataggggagggtatggtatgtgtttcagactctgagcacctgtttgagggtatctgacagcatctgtattggggttatctagtatgtgtttgggggtatctgctggacctatgtggagtgtctgacatatttgggggttacctggaagcctgttttgggtatctgatggcacctgcctgggtgcctgtgtttaggggatctgatggtatctatgttggggtgtctgagaccactggagaggtatatgattcatttttcccagacccacctttctgaagtctatgctgcctctttttttgttgttgttattttgagacagagtcttgctctgttgtccaggctggagtgcagtggcatgattatagctcactgcagcctggacctcccaggctcaagtcatcctcccacctcagcctctggaggcatgatcatagctcaccgcagcctggacctcccaggctcaagtcatcctcccacctcagcctctggaggagttgggaccacaggcaggcgcctccatgccctgctcattttaaaaaatgttttgtagagatggggtcttgctatgttgcccagactggtggtcctgaactcctgggatgaagtgatccccccaccactccctgatgctgcttcttttttctcaggtgacagaccctgccctctccatttcttggactctccccgctaggactccccaccactgggagtgccccccttaggtacttccaatcctaacgagcccgtaggagcccactgacaacccctccaggcatccgttgattcttccaaaacacccccagctccactgtcctcccttggggtccccttaaccccgctatcctccctcggggtcccccaactccgctgtcctccctcggggtccccccaaccccgctgtcctcccttggggtcccccaaccccgctgtcctccctcagggtccccctaactgtgctgtaccccccttgagattctccaaaccgctgtcctcctcaggactccctccccagccgcgctaatcacccaggcttccgttaaccccacaaaacgcccacctaaccctgctgctctccctctggatccccgcaacccagctgtcccctcagagcccccggccctactgacagccaggctcgcattgctctccttcaaaaagccccccaaccccgctgacccgcccctcaaaagtcgccctcaccctcgccgcgagcaccctcccacttcggtgcccgcgcccctctcaaggccgagccgacgccccctcaccacggctcggggagcagcagccccaggtccccgggagcgccccgccctcgagggcacgcctccttccgggtcacgccctctgccccgcctccgaggcgggatcgcgcatgcgctgctctcctcgcgcggcttcccgcttccggctcccagctgctagctactgtggatctgggggggccggacggaggcatcggaggcggctgcgagagtggcagaggagctggcggagagcggcctgcgggcgatcgggccgaggtgaggacggcggcggggcggtcccgaggaaaacggggctcaggagggggccctcggtctcttcagggggtggcctggggcgcgggacccccggggctgcctcgggcctcccgccggctcctgggggacttctccaggcaggcgaacgggtgctggggtgcaggctgctccttcaatgcatggaggctctaggcggcgattgcagggtgcagaggtgcagacgatgcccgcccgctccgtccgagccccagccagtcctggggtgctacggcttactctcctccaggagaggagaggaggggtcacttgggccccagcctctgctcctcgttcaggagcgcccggggcaggaccagggatggaatggaacccaccacaatacccagcaccgtcgtatttcaggcctcccgggagaaccctcacaccccggagcagacagccctccctggcagggagcgtttgggtgcaaaaccgtgagaactatctgtgccatgggttttagtttcttgtataagaactcagttggtgctttcattgcggacgggaacgagaagctttcccctggtccttacatgtttcgttttgttttacgtttttaaatttcaacttttatttgagattgagggggtacatgtacaggtttgttacctggatatattgcgtgatgctgaggtttggggtgtgactgatctcgtcacccaggtactgagcatagtactcaatagatagtttcaacccttgacctcctccttcccttcccgctctagtagagcccagtttctgttgtcttcttggtgtccatgagtacccaaggtttagctccacttacaagtgggaaagtgcagtatttggttttcttttcctgcgttaattctactagcacttgagtgttttgctgtggctatctgccccttatctcttgctctgttgagattaaagcctggaccacaggattaaaaaacattcttaaagttttaccacggaagcgaagcggccaacacaccttttcccctttgccttgttttcgcggagatgaagctccagccagtagctttgaagggccccattctcttcccattgaccagagagagagttcaggacagtatagacagcccagtggccaagggatgagttttgcaggtgtctgagtgaatgattaatcctccagctgtaagaggtgtcaggagaggctgggcgcggtggctcaagcctgtaatcccagcactttgggaggccaaggtgggtggatcacgaggtcaggagatcgagaccatcctggccaacatggtgaaaccccatctctactaaaatacaaaaattagccgggcatggtagcgggcgcctgtagttccagctactctggaggctgaggcaggggaatcacttgaactcgggaggcagaagttgcagtgagccgcgatcgggccactgcactccagcctggcgacagagcaagactgtctaaaaaaaaaaaaaaagaagtgtcaggagcacaggcttgaggtcagatccgagctgggttctggtcccagttccaccacctgttagccgtgtaacttcactaagtttccgtcttcccatctttaaaatgggaataagggttggttggggtttctatgaagtaatctgtgtaaggtgcatcacagaagtgtctggcatatggcaaactttccatcagtgttatacaccctttgcatatgcgaatgctcccaggcttggatgtttaggttaacattccaaattataaagagtttggaaaatttgagcatctcggatgttgtttggaccgagtcagggtttacgctttatcagtagtttcctatttctgtaggtcagcaagcctttttgcgaaaaaaaaaaaaaaaaaaaaatgaagatgtgtttgttctagagcaaaaaagagcaaacagctggcaggcataatacatttcatttttgtaaacgttactttgttttggttttgtatagcttatttagtttttgttttcttctgaaattagtatgtgattttacttaaaattttttttttctttttagagacagggtctcactctgttgcccagactggagtgcaatagcacaatcatagctcactacagcctcgaactcctgggctcaaataatcctcctgccacaaactcccaagtagctgggactacagacacgcgcttccatgtctggctaatttttaaaaattttttgggccgggtgcggtggctcacacctgtaatcccagcactttgggaggcccgggggggggcagatcacgaggtcaggagattgagaccatcctggctaacacggtgaaaccccgtctctactaaaaatacaaaaaattagctgggcatgatggcgtgtgcctgtagtcccagctagtcaggaggctgaggcaggagaatggcgtgaacccgggaggtagaggttgcagtgagccgagatcgtgccactgcactccagcctgggcaacagaacgagattccatctcaaaaaaaaaaaaaaattttttttgtggggtctcgctatgttgcccaggctggtcttgaagtcctggactcaagcgatcctcccacctcggcctcccaaagtgctaggattacaggcgtgagctgccacagcctgtggtttttgtttttgtttttttaactgacagataacagtgtatgtatttatcatgtgcaacgtgacatattcttgaaaaatgcaagaggagcggatgttaagcactttcaccacaaaaatgagagctatgcgaagtgctgcatttgttactaagctagatttaatcatgccactgtgtatatatacttcaaagtgtgtttcctttttctttttccttttgttttttgagacggtctcgctctggcgcccaggctggagtgcagtggtgtgatcttggctcactacaacctccgcctcccaagtttaagcaatttcgcctcagcctcccgagtagctgggattacaggtgtgtgccaccacgcccagctaattttttgtatttttagtagaggcggggtttcgccatgttggccaggctgatgtcgaactcctgacctcaggtaatatcccctccttggcctccaagagagctgagattacatgcatgagccaccacgcccggtcatatttcatttttaaatggcataccttagagaagcagaaaagagaccgggcaccatggctcacacctgtaatcccaacaccttgggaggtcgaggtgggcagagaggccaggagttcgagaccagcctggccaacagggtgaaaccccatctctactaagaaatacaaaaattagctgggcgtggtggcctgcgcctgtaatcccagctacttgggaggctgaggcaggagaatcgcttgaacccgcaaggcagaggttgcagtgagccgagatcacgccattgcactccagcctgggcaacagagctagactctgtctcaaaaaaaaaaaaaaaaataaagaaagaaagaaaagagattctttggttccttctctctttcttgcttaaatcgacttgagaatgtccccactttgaaaggggaagtagcacatacattgtttctggcatagctgtagtataattttcattcttgtcacacagtagcaattacggcttcaaggccattgccctttgtgggccagggccgtggtgactggctgtgcctccctgggtgtttacctagcacatgtttaacatagctcagatcgtgtgtcaagatctccctcattctcactcatcctgggtcatgtttctatctcttcaaactctatgacttacaaaacatttttgctgccacctctctgaaaatcatttaaaagcccagagaccttatatgaagtccagccaatcgctgtttctttgttatttgttaggtaaactttactttccccctgagacggtcaagaactactgtgtttgaaaaccctctctctaggtgcaaaacagcaccagtggaagcctcgcagctgcctggaggaattttttgaggggaggattgtggctgactgggtgagggagggaaactgggtaaaataatgtcctccgagagcattcggtgacagcagttgttctcatttttgtgatgcaaattaagttgtatgtgaactaaattaaatttgcttgcttctctgcttttgtcagagatagattcatagtttcaactgagtatagagttctagtctgattatgttcaatatgttcaaagcagtagatacactaatgtttttttttccttcttttttttttttgagacagagttttgctctgtgccccagcctggagtgcagtggcgcgatcttggcccactgcaagctccacctccgggttcacgccattctcctgcctcagcctaccgagtagctgggactacaggtgcctgccaccacgcctggctaattttttgtatttttagtagagattgggtttcaccgtgttagccaggatggtctcgatttcctgacctcgtgatccgcccacttcgcctcccaaagtgctgggattacaggcgtgagccaccacgccttttttttttttttttgagacagagtttcgctcttatcacctgggctggagagcagtggtacgatcacagctcactacagcctcgacctcctaggctcaagcaatcctcccacttcagcctcccaaggagctaggactataggtgcgtaccaccgcgcccaattaatttttgtatttttgtgtgtgtgttagagatagggttgcccaggctggtctcaaactcatgggctcaagcgatcctcctacctttgtctcccaaagtgttggtattatagatgtgagtcaccatgcacggcttcatacactgatttatggtcatatattgaaaaaatatatattctaaaggtttcactaacagtacacgtttaacacattgtggatggtggatggttacatttttaattcacgtcacttttttaatacagcagctttattgaaatataattagcacagcataaaattcaccttttaaaagtgtaccatttggtgtgttttaggatattcacagagttaagcaacagtcatcagtatttaattccaggacatcttattatttttttaaaaaaacagggtcttgctgtgttgtccaggctaaatgcaaactcctgggttaaagtgttcctcctgccttagcctcctgagtagctgggactacaagcatcagccaccatacctggctcagttcatcattcttatgggtgggtttcaggaggagagaaagtgaaaagagggagttggtctggagaaagtctcagctcaaaaatgaaaacaaaaattggccgggcacagcagctcacacctgtaatcccagtactttggaaggctgaggcaggaggactacttcaggccaggagttcaagaccagcctggatagcatagcaagaatcctatctctacaaaaaattgaaaaattggcaaggtgtgatggctcacacctctggccccagctacttgggaggctggaatggaaggattgcttgagccttgggaggtcaaggctgcagagagctgtgattacaccactgcactctagccttggcaacagagcaagaccctatctctaaataaataaatatttataaatgaaaagagggagtcctgagcaggtgctctctcattgcagtgtgggatggaaggaggggaggaccatgtcagattacttggcaggaatctagcatcatcttgcatacagggacatcccagttacactctgtgtagggatacctctaatttgctgacgtttcatttgaagagcaaaattgaatttagaaaccatagtaagttgggaagttatccacaatggggattactggactcattagttcccttacgggggtgaaatggatagtgacggaccaggtagaatgtagagcaaaggatttcagcatccttgggcgctggaggcagcaagggatcagctctgtagcgctgacaatgccagggtgtggtggccagtggtgggtccgtgtgaccctttgtgatgtccacttgggggctcctaaccaatgaggttttgtttgttttggttttgagtcagggtcttgccctgtcgcccaggctggagtgcagtgtcacaatcatagcccactgcagcctcaacctcctgggctcaagtgatcctcccacctcagcctcccaaatagctggaaccacaggcacacaccatcacgcctggctaatttttttttattttttggagagacaggggtcttaccatgttgcccaggctggtcttgaactcctgaactcaagcaatctgcctgccttggcttcccaaagtgctgggattataggcatgagccattgtgcccatccctaagagagatgggaagatggaaaaattggaaccctcatacactgctggtgggaatataggttggtgtagctgccttgggaaacaggcagttcctccaaagcttaaaccttgagttaacccagcaattctgttcctctgtaggttcctaaggcaaatgaaaacataggtctacacaaacacttgcagaggaatgttcatagtagcattattccaagtagccagaaagcagagacaacctaaatgttcatcagctgaggaacggatacataaaatgtggtcccgccatactgtggaatattacttggccatgaaaaagaagttccgatacagagatggacctggaaaaaacttgctcagtggaagaagccagtccccaaaggccacctgctgtatgattccatttatatgaaatgtatacaacaggcaaatccacaaggacagaaagtggattagtggttgccacaggctgggggtagtggagtggggagtaatggccaaggtaatggggtttctttttgaggtgatgaaggcattctaaaattgactgtaggctgggcgcagtggctcatgcctgtaatcccagcactttgggaggccaagacgggcagatcacaacgtcaggagttcgagaccagcctggccaacatggtgaagcccaatctctactaaaaatacaaaaattagccaggtgtggtggtgcgtgcctgtagacccagctcctccggaggctgaggcatgagaattgcctgaaccccagagacggaggttgcagtgagccgagatcctgccactgcacttcagcctgggcaactgagcgagactctgtctcaaaaaataaaatgaataaatacataaaatagattgtgatgacagatgcagaactctgtgaacatactaagaaccattgaattggatgctgtcaaagggtgagttgtgtggtatgataattctatctcaataaagcagttacaaagagaggaagagatggaataagaactggaagcacagtggcaatgggacagaattttaaggaatggtttgagactgagtggcaggaagactggggggtaaagctaagagaaccctaaaggaaaggggaccagcttgccccgtaagtggtgtggggctaggttaatagattgcctaatgcccaggagatgtcagtgtgcccatgcgctggtccctgccatgtaggaccacgtaggagaaggttacaaagtgtgtctgtaccatccagtgtgacaaagtgagagcctcggagcaggtatagcccaggcatgacccagaaagccctcttgaccagctgctgctggccaagataattatatgatcacaatttatgttatattatagcaaatttaaaattgggataatgtgattcacataccacagaactcacccttttacagtgtacaattcaatgtgtttgttttgtcttttctgagacagaatctcactctgtcacccaggctagagtacagtggcgcgatctcggctcactgtaacctccgcctcctgggttcaagcaattctcttgcctcagcctcccaagtagctggggctacaggtgcaggcctcctgacctcaagcaatccgcccgccttggcctcccaaagtggtgggattacaggcgtgagcccaccacacccggccaaatcagtgatttttactatgttcacagagtggtgcagctgtcactactataatttcagaacattgtcatcacccacaagaaaagctcacacccatagctttcactgcccattcccccatcctcccagcccccagcagccacgaccctactttctgtctctagatctgtctattctagacttttcatatcagtggaatcttacagtatacttgatgtattaatgtgacttcttttacttagcataacgattgcaaggttcatttacgttgttgcctaaacttagctttttctttctttctttctttctttcttttttttttttttgagacggtcttgctctgttgcccaggatagaggaatcacagctcactgaagccttgacgtcctgggcgcaagcaatcctcccgctttgtcctcctaagtagctggcactacaggtgtgcgccaccgtgcccggctaattttttattttttgtagagatgaagcctcgccgtgttgcccaggctggtcttgaactccttggctcaagagatcctcctgctgggctcaatgactcacacctgtaatcccagcactttgggaggccaaggcaggcagatcacctgaggttgggagttcaagacctgcctggccaacatggcaaaacctcatgtctactaaaaatacaaaaattaaccaggcgtggtggctggtgcctgtaatcccagctactgatgaggctgaggcaggagaatcacttgaacccgggaggcggcggaggttgtagtcagacgagattgagccagtgcatgtcagcctgggcaacagagcgagactccgtctcaaaaaaaaaaaaagagatcctcctgcctcagcctcacagagtgctgggattagaggtgtgagccactgcacctggcctagttatttgtaatctgtaagaagaaatgtgaaggaatagtaaggagcaccttgccagaggcaggtacgggctgccctggggccgtttcactgagttgacctgaccttgtgtgttcattgttgatcccttccctgtcctggctccagggagccagttagatgctcgaggggcttctcgggctgcgttctctgttgtcctgtaaataccgactgatctggataacagttgtcaagtcacaaaaaagagaaacacagttaggtagaaacccaaagcaaacccgctctgtgaggctgaggcaggaggatctctctcttttttttttttttttttttgagatggagtctcgctctgtcacccaggctggagggcagtggctcaatctcggctcactgcaatctccgtctcccgggttcaagtgattctcctgcctcagcctccccagtaactgggattacaggcgcccaccaccacacccggctaatttttgtatttttagtagagatggggttttgccatgtctctattaaaaggccttttagatagatcgtggagctaatccgacctgaacatcccagtcctggagtattttagcatgaggatagctctctattggtctggaaggttcgcctgatggttgggcctgaagacaggggcctcagggactctcttgtagctccttcagatgggtgcttttgttttgaccaaaaacagaacattctataccgtgatccaatgggcacacgtacaataataggatgcaaagtgttaccaaaccgaactcacctttattgtgtgcgacagactcgggtgctttatttttatttttatttttttgagatggagtctcactcacccaggctggagtgtaatggcatgatcttggctcactgcaacctctgtgtactgagtttaagagattctcctgcctcagcctccccagtaactgggattataggtgcccgccactatgcccagcttattttttatatttttagtagacacgaggtttcaccatgtcagtcaggctggtctcaaactcctgacctcaggcaatccgcccgcctcagcctcccaaagtgctgggattacaggcgtgagccaccgcgcccagcgacctcttccaacttctaaaaggtggccctagggattcctcggcttgtagccatgtcattccacaccctccgtggtcacgtggccttcacctgtgtgtgtgtttcccctctgtatctgtgtctctaaatctccctctcctttctctacacagacaccagtcataggctctagggcccaccctaaatcgaaatttcatcccgagatccttaactaatgacctctgccccaggctctctttccaaagaagtccatattccagggttcttagtggacgtgaattttggtgggacactgttcagcccacttcaggaacctcctatttctagcgatttgtaaacaacaaatttgttttgttttagtttttgtttttgaaacagggtcttgctctgttgcccaggctggagtgcagtggtgcgatcatagctcactgcaacctctacctgccaggctcaagcaatcctcccgcctcagcctcctgagtagctgggaccacaggcatgcaccaccacgcctggctaattgttggtttttgtaatgctgttttgtagagatggggttccaccatattgcccaggctggtcttaaactcttgggctcaagggatcctgcttcagcctcccaaaacaccgggattccaggtgggagtcaccattcccagcctagaacaagtttacaagctattggcactcatttcttaggctctttacaacacagtgattttccagtattttgaagttgaagtaaatgtagaaggtctcactctttagaaccagttaattgcagagaggaaagaggaggtcttcaggagaacaccagattctttttgttgttgttgttattgagacggagtttcgctctgtcacctaggctggagtgcgttggcgctatctcggctcactgcaacctccaccatccgcttgggttcaagcgattctcctgcctcagcctcccaggtagctgggattacaggcgcgtgccaccacgcttggctaatttttgtatttttagtagagacagggtttcaccatgttggccaggctggtctcgaacccctgacctcaggtgatccacccacctcggcctcccaaagtgctgggattacaagcgtgagccaccacacctggcctccagattctttttgaaaagcttctaaatctgaattctctgtgaatataatttgccaaaacgtatgagtaggaatctgatattacagtctgtcaaatgtctggccgtgtgcctatactccatataatcttttccttcccctgcattcagataccaccttcatcaaacacaaaagtgttatagattcagagagggcaaaaaacaaagctgtaccagctgccttcccctgcacctagcttacgagctgaccttgagacacaggatatgttaaaatatattcaagctcacactgttgcagttctaaaaggaatgctaatgaaggtctttgcaaggttctggaattttcctagcgtaggagctggttgctgacttatattaatagttatagccacctggcacagtggctcacgcctgtaatcccagcactttgggaggccgaggtgggcggatcatgaggtcaggagattgagaccatcctggctaacacagtgaaaccccgtctctactaaaaaaaaacaaaaaaaaacaaaaattagccgggcgtggtggcgggcgcctgtagtcccagctacttgggaggctgaggcaggagaatggcatgaacccgggaagcagagcttgcagtgagcggagatcgtgccactgcactccagcctgggcgacaaggcaagactccgtctcaaaaaaaaaaaaaaaaaaaggttatagccatcatactcaggatggtagggaacttgagatgctcagaaaccaaccactggccaggcatggtggctcacgctggtaatcccagcactttgggaggccaaggtgggtggatcacctgaggtcaggagttcgagaccagcctggccaacatggtgaaaaccccgtctctactaaaaatgcaaaaattagccgggtgtggtggcgggcacctgtaatcccagctactcaggaggctgaggcaggagaatcgctggaacccaagaggtgggggttgaagcgagccgagattgagccactgtaccccagcctgggtgacagagtgagactgagtctcaaaaaaaaaaaaaaagaaaccaacctctttgctacttgtttgtggcctgtttgctcccagcatgggcaatttcaagcgtctggaattcagtaatgactttgcacagcgaatccactttgccactccttttattccggttccttctgcacatcagggatagagcattgggagttcccagactgcatgagcccagctggttgcatttgaattcttggaaataggctctcccttccagaacaaaccaattagatatagtaggccaggggccagcaaattttttctgttaagagctaggtagaggccgagacgggcggatcacgaggtcaggagattaagaccatcttgactaaaacggtgaaaccccgtctctactgaaaatacaaaaaaactagccgggcgtggtggccgcgcctggagtcccagctactcgggaggctgaggcaggagaatggcgtgaacccaggaggcggagcttgcagtgagccgagaccgcgccactgcactccagcctgggcaacagagcgagactccgtctcaaaaaaaaaaaaaaaaaaaaaaaaaagaggtagtaggctgggtgcagtggctcacgcctgtaatctcagcatttcaggaggcagaggtgggcagatcacttgatcccaggagttggagaccagcctgggtaacgtggtgaaaccccatctctactaaaaatacaaaaattatccaggcattgtggcttatgcctataatcccagctacttggggggtgagacaggagaattgcttgaactcgggaggttgaagttgcagtgagccgaaatcgcaccactgcctccagcctggatgataaagtgagaccctgtttcaaaaaaaagagaaagagccagataataaatatttcaggctttgcagcccacatagcctctgtcacagccactcaactcaaaagaagccacagacaacagagaaacaagtgggcgtggccgtgttctgataaaattttatttacaaaaacaggtggccagcccacagacagtaggggttcaccagcccctacagtagacgcatcatttttacagttctgtttctagggccacaatggtctgactaaatttggcgagggatgcgggttagggaacaggaggccctcacctgtctcatgagcttagcagctgtgtcccaggttgacctcttcacaatctgggcccatccatgagcagcagctccctgaggggcccctctttatcctgcagtgtgttttctaagggagtaatgatctgttgtggtatttgcaagcctgggggtgttcaacatagagtttgagtccccccagatgaaaacaacaagaccggctgagtgcagtggctcacgcctgtaatctcacactttgggaggctaaggcgggaggatcacttgaacccaagagttcaagaccagcttgggcaacatagtgagaccccatctctacaaaaagaaatatataaacttacacacgcgtggtgactacaggtaggtagtgtgcacctatagtcccagctacttgggaggctgaggcaggaagatcgcttgagtccaggagttcgagactgcagtgagccgtgattgcaccactgcattccagcctgggcaagagcaagaccctgtttcttttttttttttttttttttgagttggagtctcgctctgtcgcccaggctggagtgcagtggcgtgttctcggctcactgcaagctccgcctcctgggttcatgccattctcctacctcagcctcccaagaagctgggactacaggcgcccaccacctcgcccggctaattttttgtatttttagtagagactgggtttcaccatgtcagccgggatggtcttgatctcctgaccttgtgatccaccgcgtccggccgaccctgtttcttaaaaaaaaaaaaaaaaaaaagacttaatggcagtcccagtccatgctatggaaaggttggcctctgtgagagtttggattagattggaaactaatgaagagtcttttttttttttttttgagttggaggccactctatcacccaagctggagtgcagtggtacaatctcggctcactgtaacctccacctcctgagttcaagctattctcctgcctcagcctcccaagtagctgggattacaggcgcctgccaccacctccagctaatttttgtatttttgtattttttagtaaacacggggtttcaccatgttggccaggctggtctcaaacacctgaactcacacttgagccaaggcccacctcggcctcccagagtgttgggattacaggcgtgagccatcgcgcctggcctgtgaggggtttttctttctttctttcttttttttttttttttattgagatggagtctcactctgtcgcctaggctggagtgcagtggtgcaacctcagcttacttactgcaacctccgccctccaagttcaagcgattctcctgcctcagcctcccaagtagctgggattacaggtgcctgccaccacacccggctaattttttttgtattttttttttttttttttagcagagatggggttttaccatgttggccaggttggtcttgaactcctgacctcgtgatccacccgccttggcctcccaaagtgctgggattacaggcgtgagccatcatgcccggcctgtgaagggtttttctaaggttcaccagccctgacatcattgcagttccctttttccagaaatgcagtgcccttgaatactttccccgcccattgaaggcaaacagggttttttctggcattctgcacacctgttttgctgccctgccttccgcctgtgactgattgcttttgatctgctgaaagagaaacccccggcctctctcaggtgtttggtttcctctgtccgtcttagagtcacctctgctgacatttatttgctgtttatttcccacattaaaattgttggcttgaaatatatatatatatacacacacacatacatacacacacacatatgtatataaatcttccagctttctggaagatttcagctatgtaactagacctgaattaatgttttcagaatcagtcttcttttcatcaaaatgtttttcaggggctgggcatggtggttcgcgcctgtaaatcccagcactttgggaggctgaggctggcagatcatctgaggtcaggagttcgagaccagcctggccaacacggtaaaaccccatctctactaaaaataaaaaaattagctgggtgtggtggcatgcacctataatcccatttacttgggaggctgaggcacgagaatcgcttgaacctgagaagcagaggttgcagtgatctgagattgtgctattgcactccagcctgggcagcagcgtgagactccatctcaaaaaaaaaaaaaaaaaaaggtttttcacccttgtcattttgatttctgcccagtcaatagaactaacataattgtttaaaaaatgccacgcactgcccttcctaagaaggcctcagggggtggaatagttttgctgggacctcttatacttcagcatctggcctgtacccagtgtcaagagaaatactcacaaggcagatgctttttcagcatctgcaatatctataggtgatattgaaggtccctccatcctgataccagaaaatagtgtgaaatttgcacaaaaggaagcagaggatctcagaacaagcctgggcagcgcagggcctctccacctgagacctggccttaggcactttcttttgtcagatatgttaaaaatgaagttgcacaccaagcttctctctttccttcttttcttcctgttcctttcccctacctcttccccttccccttccccttcccctttccctttccctcccctccccttcccttttcttttctatttcttttcttgacagagtcttgccctgttgcccaggctggagggcagtggtgtgatctcagctcactgcaacctccacctcccaggttcaagcagttctcctgcctcagcctcccaagtagatgggattacaggtgcacaccaccatgtccagctaagttttgtatttttagtagacacaggctttcaccatgttggccaggctggtcttgaactcctgacctcaagtggtctgcccacctcggcctcccaaagtgctgggatgacaggtgtcagccaccgtgcccagccaagtggcatctttttttaaaaaaatcattttttaagtgcacaggttggtggcattaaacacatacacattgctgatgctaccatcaccaccatccatctctagaactttctcctcttcccaagctgcaactctgtcctcataaaacactcactctccatccccctccccagcccttggcacccaccattctacttcctgtctctatgaatctgacaactctagggacctcctagaagtggagtcacatacgatgtattcttttgtgactggcttatttcactgagcatagtgtcctcaaggtccatctgtgtgtcagaacttccttcttaaggctgaataatattacagtgtgcgtgtatgtcacgttttgtttatccattcatctatacatgcacacttatttccatgttttgtgtttttttgtttggtttttcttttttttttttgagatggagtctcgctctgtcacgcaggctgcagtgcagtggcgtgatcttggctcactgcaacctctgcctcccgggttcaagcaattctcctgcctcagcctcccaagtagctgggattacaggggcgcgccaccacacccggctaatttttgtatttttagtgttggtcaggctggtctcgaactcctgacttcgtattccggcctcctcggcctcccaaagtgctgggattagaggcgtgagccaccgcgcccggcctatgctagggtttttaggaaccaccaagctgtcttccatagcagctgccccattttaccttcctaccagcagtgtatgagggtcctggtttctccgccttctcaccgagacacttaattttcggttttttaaattataccattttaggccaggaacggtggctcagcctgtaatcccagcactttgggagacgaaggtgggcggatcacctgaggtcaggagttccagaccagcctggccaacatggcaaaaccccgtctttactaaaaatacataaagtagccgggcgtggtggcaggcgcctgtaatcccagctactcaggaggctgaggcaggagaatcacttgaacccaggaggcggaggttgcagtgaactgagatcgagccactgcactggagcctgggtgacagagcaagactctgtctcaaaaaaaaaaaaaaagtaaataaaataaattatcccatcttagtgggtgtgaagtgggcggttttgctttgcgtttccctggtgactactgatgttgagcgtcttttcatgtgctgactggtcgtttgtatctcttctttggagacgtgtctgtttacatcctttgcccatttgtgaatgggagtatttgttttttattgttgagttggaggagtccccttactagttgcatctgacactataggatcttgcaagaactggaaagcaagtcacagtttcccgtgacctttggcatttcagccagcgaatcaggatcaaacacatggaaatagaaagcatctaaccacgtcccacaccatatttttgggggcaggatcagaagcacgcagagatattaagatagttatgggctgggtatggtggctcatgcctgcaatcccaacactgtgggaggccaaggcaggaggatcgattgagcccaggagttcaaaaccagcctgggcaacacggcaagaccctgtctctaccaaaaaaaacacaaaaaacaaaaagcttttttttttttttcttttttttttgagacagagtcttgctctgttgcccaggctggagtgcagtggcacgatctcggctcactgcaagctccacctcctgggttcacgccattctcctgcctcagcctcccaagtagctgggactacaggcgcccgccaccatgcccagctaattttttgcatttttagtagacacggggtttcaccgtgttgaccaggatggtttcgatctcctgacctcgtgatccacctgcctcggcctcccaaagtgctgggattacaggcgtgagccactgcgcccggcaaaaaaatcttttttaattagccatggtggtgtgcacttgtagttccagctacttgggagatagggagaaggattacttaagccccaggagtttggggctgcagtgagctatgattataccactatactccagccgagactctgtctccaaaaaataaacaaacaaacaagatggtcgtgaggtaatcatcttttagccatgctcatcggtggatggaagttcacaaagctgttaattaatgggctgatgttaacttagtaggaagccacccacggttctgtcctctgctgtgtctcggtcagtcatttaacttgtaatttgggaagataaagatgtagaaagcttatttatcaaagctggagatgacagacagctataggggtggctttaatcaccaggtgacagagtgagtaccgggatgcttagattcctgcgcgtgggtctaaatcagggtttcccagcctagatactgtaggcatttggggccggatcattctttgggatgggacctacctgggcactgcagggtgctgagcagcatccctggcctccacccaccagatgccaggagcacccctcttcccccctcactcccatagcaaccaaaaatgtctccagactctgccaaatgaccctgggagcaagaatcacccctggtagagaatcgttggtctagataagcaaccatataagtacaggatggggaaatagaacctcatgacagcttgtgaggaaacaacttcggggtttcagttgatcgtttttttaaaaagtcataataatactagtttgagggccaggcgcggtggctgatgcctgtaatcccagcactttgggaggccaaggcgggcagatcacctgggtcaggagttcgagaccagcctagccaacatggtgaaccccatctctactaaaaatacaaaaattaggctgggcacggtggttcacgcctataattccagcactttgggaagctgaggcaggcggatcacaaggtcaagagatcgagaccatcctggccaagatggtgaaaccccgtctctactaaaaatacaaaaattagctgggcatggtggtgcgtgcctgtgatcccagctactctggaggctgaggcaggagaatcgcttgaacccgggaggtggaggttgcagtgagctgagatcgcgccattgcactccagcctggcgactgcgagactctgtctcaaaaaaaaagaaaaaaacaaaaacaataaaaatacaaaaattagccgggtgtgggggcaggtgcctgtaatcccagctactcgggtggctgaggcaagaggatcatttgaacccagaaagcagaggttgcagtgacccgagatcgtgccactgcactccagcctgggccacagagtaaaattccatctcaaaataaataagtaaataaataaataaaataatactagtttgagccagtgattatgatacaactgtgttctcccctcccccaaaataaaaaccacgcatgccattcagctattctgctcccaagaccgctttcaacaaagctggacccaaggaccttagttccatcccttatcccattgaatctccaggcagctccattaaaccacctccctaaccctgctcctgggcactcctgggttctcccgggcttcaggtagcaccttaggcccaaatgtccaccccttgcttagagcgccctcctgagcgcaacaccccgtgccagcggctgcctgctgccgagcccgccactctgccccccacttcatggcccctgcaccgcccctctctgccactctccaccctgccctcgaggtcccggtccccctgcgtccaccagcaaccccttccagtgtgccctgctccccacgctgcagccatcgtttcgagaagcagagctcatccaatcctccacataaacctttccgtggcttcaggttcaatgacaaagtgactctccaagggcccccaaggcccatggcagaacctcctggaataagacattccctccaccctgccctttcctttctctgaccggtccagaccaggtccctcccagacgtcctctccctccctccctgaagcgcgtatttgttaagcacccacccaccacatgacaggcctcgtgccagccatgaccacagagacccgcagctcctggagtttcccttctaaataaacaaaactacagttgagccttgggatttgcagagtcagtgtttacccttttgaagatatacccaggagtagaattgctggatcggatggtaattctttgtttaattttcacccgcttgctaaaatttctctgtaaccgcaacatgaatccattcatattggtgcagagtggagaaaacttggagttcccacacaggttcccagctgaggctgagcgaggcgacactccaccttctcgttcagcctctcacactgtaaacacatgccctgttgaaggtctatggagtaccacggttttcgcatttgtgtgcttcttgttggtgatgttaatgttgaaaatgacccctagctgggcgaggaggctcatgcctataatctcagcacactgggaggcctaggcaggaggattagttgagcccaggagtttgagaccagccagcctgggcaacatagcaagaccctatctctaaaaaaaaaattttttttaattagccaggcatggtgtcacacacctgtggtctcagctacttgggaggctgaggcaggaggatcccttgattccttgagcccaggagttcgaggctgcagtgagctacgatcacgccactgcagtccagcctgggcagcagagacctcatctctaaaataacaatataataataaattttttagaaaataaaatgaccttcaaacgtagtgctgcagtgccagcaagtgcccctgagtgcaaggaggctgtgatgtgcctcacggagaaaattcgtgtgtgtgtgtgtgtgtgtgtgtgtgtgtgtgtgtgtgtgtgtgtgttttggggtggatgatattttatttgggtttttttttttttttgagacagagtcttgctctgctgccaagcctggagtgcagtggcacgatcttggctcactgcaaactctgcctcccgggttcacaccattctcctgcctcagcctcccgagtagctgggactacaggtgcccgccaccacgcccagctaattttttgtatttttaagtggaaacggggtttcactgtgttagccaggatggtctcgatctcctgacctcatgatccgctcgcctcagcctcccaaagtgttgggattacaggcgtgagccaccatgcccggctgtttttgttgttgttgttgttttttgagatggagtctcacactgttgcccattctggagtgcagtggcaccatctcggctcactgcagcctttgcctcccaggttcaagcgattctcctgcctcagcctcccaagtagctgggattacaggcacgcaccaccacacctgcgtaatttttgtatttgtggtagagacagggtttcactatgttggtcaggctggtctcgaactcctgacctcaagtgatccacccgcctcagccaccacccaaagtgctgggattacaggtgtgaaccactacacctggcctggatgatattttaaacaaggtggcctctggggcttcactgagaaggtgggcaggtcagacaagatggcttaccacctgtaattctagcactttgggaggcagagggaggaggactgcttgaggccaggagttcaagaccagcctgggcagcatagcaagaccctgtctctatttgaaaattatacatttaaaaataaaagttggcccagcacagtggctcacacctgtaatcctagcactttgggagaccaaggcgggcagatcacttgaagtgaggagttggagagcagcctggccaacatggcaaaaccccatctctactaaaaatacaaaaatcagccagacgagtggcgcacgcctgtaatcccagctactcgggagactgaggcatgacaatcacctgaaaccaggaggcagaagttatagtgagctgagatcgcaccattgtactccagcctgcatgacagagcgagactcggtctcaataaaaataaaatgaaaaagaagatggggacaggcagaaggagcagcagccacgggggcccagtgggatggtgacatgtttggaggaggccggggtgggtggagccaggtggcccaggagagtgggagagtgaaggctggtggtagctggtgaggagatagcctgggtggggccagaggtcctggactctctgtaagagaccagatggtacataccttgggctttgtgggcagcataaggtctctggtgcatatttttgctctaccaaaggaggtgctggatttggccctggggccatagtttgccgaccattcttgcaggtcacagtgaagacgggttcctggggaaggtgggggccatggcagggctttgagcagaggagggacatgcctgacttggttgttagttgaatcattccagcagctacggaggaagtgaatggtagtacaaatagtcaaggaaagtatttgctttgtgtcagacagcattccagaatgttctctatcacagccaacccccagagagggcattactggttttttgtgtttgtggggtttttttgttttgttttgttttgttttaaggcgggatctcactgtcaccccagctggagtgcagtcgcacaatcacagctcactgcagcctagaactcctgggcgcaagcgatcctcctgcctcagccccccaagtaactgggagcacaggcgtgcaccatgcttgactaattttttacttttggtagaaatggggttttgcaatgttacccagactggtctcaaactcctgggctcaagcattcctcccactctgtcagtgacagatggccactctgtcaccttcttgccacctcagcctcccaaagtgctgggattacaggtgtgagccactgtgcccagccagcaggcactacgattatccccatcctacagatgggggaaatggaggcagggtgcagttaggtccctggctctggatctcggaggtgggggtttgagcccgggcagcgtggctgcgatgtctgttcctagcacacctgccctctctgccccggcccatgtggctgatggagttgtcggtgtggattcaagggggagagagggaggagaggaggtgaaggtggcactcattgacggctcttttgagtttccacaaatacttgtttcctggagagtctttcctttcagacatctgctagtccacctggcgcctgttcagtaagcaccagggaatggaagggcctctcccttcatttctgcattgcaggtgtgtctgctctccagccccccagcagcccctcaccccaggtgcacccgcactcggcctctgtaccccagatgtacccacactcggcctctgtaccccagatgtacccacactcggcctctgtaccctgatgtacccacacttggcctctgtaccccagatgtacccacactcggcctctgtaccccagatgtacccaccctcagcctctgtaccccagatgtacccacactcggcctctgtaccccgatgtacccacactcggcctctgtaccccgatgtacccacactcggcctccgcaccccaggtgtgcccacactcggcccccgcacctgggtgtgcccacacttggcccccacacccgggtgtgcccacacttggcccccgcaccccagatgcgcccacacttgccccctgcacccagatgcacccacactcagcccctacaacccagatgtacccacacttagtccccccacaccccaggtgcacctgcagctccttcaccacagcctgggcagcccatcccactgtgaagggaactcccggcctccagcctgtctcagaaggacccctctctccctacccttgcctgctgcaggacaggcaccaccctagtcttgccctgaaacccaccctccctcaaaacccttttctcttgaagggtttccttttctccatcaggccaccctagcctaaacctcacggaggattctcccacacactccagacctgccgtcttgagcactgagttgcgtagggtgtgttgcagtcacttgggaaggtgtcgggcagggcacttttccccaggacagacttctgaaccccaagcccatgcaggtggcccttacctcttcttcatctgtgttttgaatacacaccctccaccatagaaagctgcctggagtggaagcacctggggtgcacccacacttgggctctgtaccccagatacacccacactcggcctctgtaccccaggtgtactcacactcggccctcataccccaggtgcgcccacactcggcctccacacccacactcggcccctgcaccccaggtgcacccacactcagcccccacactcacgctaagccctgacgacagcctcaggccagctgagctctcagagattggcaactaatcaaaaaaggccagctctctctatatattttagagattgggtcttgctgtattgtccaggctggtcttgaactcctgggctcaagtgatcctcctgctgcagcctcctaagtacaggtgggactggggctacaggtgtatgccaccacggccagctgagcaattattattattttgagacaggatcttgctctgttgccctggctggagtgcagtggcacaatctgcaacctccacctaccagttcaagcaattcccgtgcctcagcctcctgagtagctgggactacaggcgtgtgccatcacattcagctaatttttatatttctagtagagacgtggtttcatcatgttgcccaggctggtcttgaactcccagcctcaggtgatccgcccacctcggcctcccaaagtgctgggattccaggcgtgagcccccacgccgggcctgttttgcttgtttttaagtgacttgcttttcagtttttccaaagcatttgactctgtttcgtagaaacactcaactcttttgcacccatgggttcatgagttatgagtttaggtggcactttgtcgctcaagtgcataactttgatggcaggcagcgatggcacacacagccctgggaacaaacagtaatggctctgggtaagcacagtttgcaggcagacggctgcagagggcaggtggccctgccctgagtcacacccgtcgtggagaggagacgttatggggtgagcctgtcaaacctaagagtcttaagactctgtctgctgtgctggttcacctgggatggatggcggacagctctgttcaaaactgttttttgtttttttgtttttgttttgaaacagtcttgctctgtcgcccaggctggagggcagtggtgcagtgatggctcactgccgcctccaccttccgggctcaagtggtccttccacctcagcctcctgagtagctgggtctgcaggcgtgtgacaccacactcagctaatttttgtattttttgtagggatgtggtcccactgtgttgtccaggctggtctcaaaactcctgggctcaagcgatctgcccacttcagcctccaaatgccgttcctcaggattatgtctttgactgcagtcggcccttgaacagcacgggtttcagctgcgtgagtccagttacacacagacgtttttcagtcaatacagtcagccctctgcagccacaggttctgcttctgcaaccaaagcagaccaaaaatacagtgttctcaggatgaaaacccacagattcagagggccgacttttcccatatgccggacaactgtacccccctcttcttttctgtttctgcacatggactgctcccaaatagatatccccagctttggccggttgcagtggctcacacctgtaatcccagcactttgggaggccaaggcaggcagattacctgaggtcaggagttcaagaccaggctggccaaacatggtgaaaacccgtctctactaaaaatacaaaaattagccaggcatggtggtgcacgcctgtaatcccagctacttgggaggctgggacaggaggatcacttgaacccaggaggcagaggctgcagtgagctgagatggtgccactgcactccagactgggcaacagagtgacactccgcctcaaaaataaagaaataggtgtccccagccttgatgatggccctgactccacgcacgtctcaacagccttcaggacttctgagcagagggtcctgggtggcatttcagactgaccatgtctgctgggagagctgttctttttcccacctctgtccccttctcccttccttcttccaggtcccacctcggtggcccaaaccagacatcttcgtcatcctggcctcctccatccgtgcccgtgtttaccggggcaccaagccctgctggttctgcctctgacctcctgtcccaacttttcaccctctgccttccttaagggctttgtcacctcgcactcaggctgccaaactggttccctgcctctgtcatctctctgtccccgtctaatcatttgcctctcctatcactggttacctctgtaatgcaggtttaatcatgcctctccctgcctaaaaccttcccctggctcctattctggaagagtgtcgtagggcagcatgtaaaacgccacgcatgccccgcccagcctgccttttaatcttcatctctggccacactcttctagcactgcctgtctgcccagctcccgcccatgcccccccgccccgcgcagccttctgtcctgtaaccaccttccccacaatatgccatcattccccctgttaatggctctgcccttgcccactgtcctatcctggaatgactttccctcatccttctttcttctaatgacctcctattcatccctcaaaacccagtgcaaaggatcccatgatctcctgccttcaggcaaaatgactcaccttcctcctcaggccaccccagctcccactattggcgatcccatcatcctttgctaacacaccacctcctggatcacctgggctcctctggactggagatctcctctcaaacaccgcatcatcagtcccacaacaaaatgtgttctaacttttcttttttttttttttttttttgagatggagtctcaccctgtcacccagactggagtgcagtggcaggatctcggctcactgcagtctccacctcccaggttcaagcaattctcctgcctcagcctcccaagaagctgggattacaggcacacaccaccacacccagctactttttgtatttgtagcagagatggggtttcaccatgttggccaggctgatctcaaactcctgatctcaagtaatccgcccatcttggcctcccaaagtgctgggattacagtcataagctaccccaccaggctgttttaacttttctaaacagatgtgtaaataatttttttttggaaacatggctcatgggtcatcagtgactgtctggacagctcagggattaatagccgggaggagctaagccccagttcctcctcgttccattgtgctggggtttcatggattattactgagcccatttgcacggtccggtctgcgttcaggagaatattgtcccatctatcttcagttagctgtttgagtattcgggttgggtgtgagggagctaacagttggccccttgctctgttctcagattcttgaggtttatttcccccttgaattgtcccaacagtcctgtgaggtggatgtcatttattacttctgcacagatgactaaacaatctcaggggagcctggtcattaattggccatgatcaaaaaggtagtgaaagcacatggcagcactttgggaggccgaggcgagcggatcacttgaggccaggagtttgagaccagcctggccaacatagtgaaaatccttctctactacaagtagaaaaaattagccgggcgtggtaatgcatggccgtaatcccagctactcgggaggctgaggcacgagaatcacttgaaccaacccaggaggcagaggttgcaatgagccgagatcgcgccactgcactctagcctgggtgacagggcgagagactctatctcaaaaaaaaaaaaaaaagcacgtggcagaataagattcaaacccgtgttccacctgatgccaaagcctgtgttttggaaaagaaatgtcatgtatcaagatacccctaattctacagcccgcatccctacacttgggaaaggaaacagaggaagtcgatctagtattgatagaagcgagctgtgtgttctagtggctctagtagaagtgaacccagaagtggatctcatagaagcaagccatgtgaaaactgacacactattgatttggggtggcatcaaaaatggtggccctccactttgaggtttttatgttatttacttatttatttatttctgagatggagttttgctatttttgcccaggctggacagtgcaatggcgtgatctcggctgaccgcaacctccacctcccgggttcaagcgattctcctgcctcagcctcccgagtagctgggattacaggcgcccaccaccacgcccggctaattttgtatatttagtagagaaagggtttctccatgttggtcaggctggtctcgaactcccgacctcaggtgatccgcctgtctcagcctcccagagtgctgggattacaagcatgagccaccaccccaggccggagtttctttcttgagctagattttcttgcaaggttacacttattagcaaagtccttgggaaaagcaatttggtaatgcaagtctaaacatcagaaaggatttgtaacctttgcgtccaaaatctcgtctcacggaggctcttgtatgaaattggaatgcctcgaatgtctaacagcagggaaacgattaaagcgatacttacaaagtctatagcaacgtgaaatacttgtgtgttccctgcaactataactgaacatgtacacccgtgtcaataaagatgggggcacagagacatttgtaagtgatggtaagagtgctggtcgattttaatttaattttaaattttagttcactcttgtactattcattaagaaggctcaaatttagactgggcgcggtggctcacgcctgtaatcccagcactttgggaggccgaggcgggcggatcacgagttcaggagatcgggaccatcctggccaacatggtgaaacctcatctctactaaaaatacaaaaatttgccaggcatggtggcaggtgcctgtaatcccagctacttgggtggctgaggcaggagaatcgctggaacccgggaggcagaggttgcagtgagccgagatcacgccactgcactccagcctggtgacagagtgagactacgtctcggggaaaaaaaaaaaaaaggctcaaattcaggtaacagtgctataggtgatatttcttcatgagcccttatcagtatttcccgagagccatttcttatcagccaggaatctttgcagatgaagagtttgtaccacatttgtacttttttaagaccatgacatgcagccaactggttttatgcccaagaatgttccactttgttccgccctttttttttctaatgcccctaaggtgactcacctatagcagtttaccttagttcttatcttcattaaacaagagtagggctctggcttggtcttacacatttagagaaatgcgttctacatcaatggaaaaaaggtgggggtctccccctacttccccacaaaaaaaacaaacttttgaagttaaagcttattaagaatgggccgggcacagtggttcacgcctgtaatcccagcaattggagagggtgaggcgggcggatcacgaggtcaggagttcaagaccagcctggccaacatggtgacaccccgtctctactaaaaatacaaaaattagccaggcatggtggcgggtgcctgtaatcccagctactcaggagactgaggcaggagaattgcttgaacctgggaggtggacgttgcagtgagctgagatagcgccactgcactccagcccgggtgacagagtgagactccgtctcaaaaaaaaaaaaaaaagcttattaagaattatgagaggccgggcacagtggctcatgcctgtaatctcagcactttgggagaccaaggcaggagaatcgcttgaggttaggagttcaagaccagcctgggcaacatagcaacaccctgtctctacaaaaaacataaaaattagccagacatattggtgtgtgcccgtagtcccagctactcaggaggctgaggcaggaggattgtttgaactcaggagttcgaggctacagtgacctatgaatgcaccactgcactccagcctgggcaacagagtgagaccctgtctcaaaaataaaataaaataagaaaataggaaattagccaggcttggtggcacatgcctatagtcccagctacttgggaggctgaggcaggaggatggctagagcctagcagttggagactgtggtgagccatgactgcaccactgcactctaacctggtcaacagagcaagaccctgtctcaaaaaagaaaaaaagcagcaaagaataacctgggcgcggtggctcatgcctgtaatcccaacactttgggaggctgaggcgggtggatcacctgaggttaggagttggagaccagcctggccaacatgatgaaacctgtctctactaaaaatagaaaaattagccgggcgtggtggaacgtgcctgtcgtcccggctactcaggaggctgaggcaggataattgcttgaacctgggaggcagaggttgcagtgagctgagattgcgccagcacactccagcctgggcgacaaagtgagactctgtctcaaaaaaaaaaaaaaaagaaaaaaagcaccaaagaatgatgagaatttactcttaggtagtacaccagacacctaatcgacgtctagtgatttgggcaccagaatctagctctctgcctgcctttcccacctccacctcagttttccccttatgcaaaatcacgtagtattttcctatgtcacagaaatgccgctgccgtggctgagagaacgtttgctcagaatggaatgcttccaccaggataaaggccttaggatgtggatatttccagctagcagcaagtgtgttttgtactgtgaagcatcccttacttttaggacgagactggtcccaggaggaaaagtggcgtcgattggtttccatggagaatgcagtttctcactgtggactcttgagttcttagttatgctgtcaaatattctaaaatcataggtcacctcgccgtgttgaaaggttctacagagccttctgagtctcagagaaagttaagtttgaattcttggggtggaggagccgaggtcaggcactttggggttagaggtgaccctggcctcctttttccctctcgtaagctcgaggtggggaaaacccagaacccccactgcaggcaagaatgtggttccatctggcctttttgctgtcgcagaacctgccaggaaaggcgcacacaggatgttttagggcccaattcaccgcaggctcctggagagcccccagtgaagaaatgagtctcactgaggtcaaatgttgccccagctgcctcactttcgcaaggtgggcccaacggcaagtgtgtctacccagtaccctggaggggggatgtctgtgggcttcatgtgtccaggcattgtccagaaaaaaagggctgtcttggccaggcatggtggctctcgcctgtaatcccagcactttgggaggccgaggtgggaggattgcctgagcgcaggaaggagttcaagatctgcctgggcaacatagcaagaccgtgtctctacagaaaatacaaaaatcagccgagtgtgggagtgtctgcctgtagttccagctacttgggaggttgaggtgggaggatcactggagcccaggaggtcaaggctgcagtgagctatgatcacgccactgcactccaacctggatgacagagggagaccctgtctctaaaaaaaaaaaaaaagaaggccgggcgcagtggctcacacctgtaaccccagcactttgggaggctgaggcaggcagatttcttgagctcaggaattcaacaccagcctgagaaacatggtgaaaccctgtctctactaaaaatacaaaaattagccaggtgtgttggcacacgcctgtaatcccagctacttgggaggccgaagcacaagaattggtcgaatctgggaggcagtctgcagtgagccaagatcgtgccactgtactccagcctggatgacagagtgagactctgtctcaaaaaagaaaaaagaaaaagagggagagaaaaaaatgaaaatcacctctcttttaaaggaatagaataagagtaacagagtcaaatctctgggcaaacatgtacagaacttaaataaacagtaagaagaataagatgataaaaccagaaagtagctcaacagttaattcctgcggtcatgttgagaatgtgtaaggattttcatgtttatgtgaaactgaatgggggtgggtggtagctaagtcgaagagtcatacaattccacttaagaaatagcagtgcttaaaatgcattttttcaggcagtttttaactcaattttcttgggtaagtaacccttggctttgcgaggtagtttgtgttcccatctgtcgggccaggcgcccacttgcttcctggctatggccttccttcaccttccagcagaacctggtgagcccacggcctgttgcatggagattttctttcttctgaaatggactctcacttctctcaagctggagtgcagtggtgcgatcatagctcactgtagcctcgaactcctggcctccagtgatcttcccaccttggccttctgaagagatttttttttttaagtggaacttaaaatcccaccaaagataatggccctgaaggtggctgttgtctttaatggttcagaaggctgaggcaggaggatcacttgagcccaggagtgggaggctgcagcgagctatgaccacgccactgcactccagcctgggcaacagagtgaaactgtgtcgaaaaaacgaaagtgaaatggccaagaaagagattaccctgggcccctgcaggtcgaacctttgggtgccctccctgatctctctcctaactgtgctccccgccctgcccgactgcatccttcgccacagggccgtggtagcctgcatggctgtgtgctcgtgccgcaatgggctgagcacgtagatctgatgtgacaccagtgcctggagatgaacagcacctgacccttgctcccagggaggtcaaggtgcagcgaggctgtgcaataaagtcgggagtgtggtgagctgtaaaggaagcccgcaggcctaggccacgggcccgagggcaggggcacgccatgcagaaggactctgacccggccccacagctggccagataagagagacgccttgagtcgaggggccgggggctctgaggctcccccctggtatggcatgtcagcgtagttggggtatagggtacaaaatgtggcaagaggtgaggccagagagggtctggaccctgtagatggggcgggatgagaatgggtgagtctggatgggcagccacccacggcgatctcagcctgggctaagtgaccagtgggcagccccaaagcccgttaaacagaaggccaggtgtggcggctcatgcctgtaatcccagcactttaggaggccaaggcaggcagatcacttgaggtcaggcttttgagaccagcttggccaacgtggtgaaacctcatctctactaaaaataccaaaattacctaggtgtggtggcaggcgcctgtaatcccagctactcgggaggcttaggcgggagaattgcttgaacccgggaggcggaggttgcagtgagctgagatcacaccactgcactccagcctgggcaacagagtgagactccgtctcaaaaataaataaataaataaaaataaacaggcagaaggcagaactgtggccgattggatttcagggtgcaagagaagtcatcatcccacagacgccccccaagctggggctcatgtccctggcacagagagagggcccacacccataagaggaggctctagaagatcccacaagaggggcccagagggcagtggcatgcatgccacggagagggtgctgtctcctggccagtgagttctggttctttcttaaatcagagcgctcccgtgcatatgccttagcaaaatctctgctgtgtttaacaagcctcagtgcatcctggaagtactttttttttttaaatcgacttgtgcctcaatatactttttttttttttaaggaaactattgcttgggaataattttcagtttacagaaaaattgcatagatagaaaagagaatattcatggtacccacacccagtttccccgcacattaataactgatgactaaactcccaggctttatccaaatttcacctatttttctgctccagaatccagctcaggctcccacattgcacttggtggatttaacttttgagatacttccctgtcattttttatttttctttaaaagaaatgaaggccggctctgtcacccaggctggagtgcagtggcatgatcatggctcactgcagcctcaaggtcccaggctcaagcgatccttctgcctcagcctcccgagtgctcaggactacaggcatacactaccatgcctggctaattttttttttttttttgacagatgaagtctcaccatgttggccaggctggcctcaaactcttgaccttaagtgatcctcccgcctcagccctgcaaagtgctggaattacaggcatgagccactgtacccaaatacacagctcccaaaattaacacaggccaggcatggtgttgcctgtaatcgcagcactttgggaggctgaggtgggaggacagctaaagcctggagttcgagatcagccttggtaacatagggagaccctatctctataaaaatatctaaaaaattagctgggcatggtggtatgcgcctatagtcccagccacttgggaagctgaggccagaggactgcttgagcccaggaattcgtaactgcggtaagctaagtctgtgccactgtactccagcctgggtgacagagcgagaccctctcttcaaataaataagtaaataaaatagaacaataatgcccacatccatagacaataaataaatataccaaccatcctcaacctaaatgttatacttcataacaaaaatgaactccagcactttgggaggccaaggcaaaagcatcacttgagtccaggagttcgagaccagcctttgcaacatagccagatcccatctctaaattagccaggtgtgatagcacacacctatggtcccagctattcgggaggctgaggtgggaggatcactcgagacaaggaggttgaggctgcagtgagccgtgatcgtgcctgtgtactatagccagggcgacagagtgagaccctgtttcaaaacataaaaagataaaataacagtagtacctacttttgagtcattgtgaggactgcaggacttaagaaatattaagtgaggccgggcacggtggctcacccctgtaatcctggcactttgagaggccgaggtgggcggatcacttgaggtcaggcattcgaaaccagcctggccaacatggtaaaaccccgtctctactaaaaatataaaaattagctgggcatggatgtgggcggccataatcccagctactcaggaggttgaggcaggggaatcgcttgggaggcggaggttgcagtgagtcaagatcgtgccactgcactccagcctggacgacagagtgagactccatctcaaaaaaaaaaaaaaaaaaaaaaaggccgggctcagtggctcacgcctttaatcccagcactttgggagtccaaggcgggtggatcacctgaggtcgggagtttgagaccagcctgaccaacatggcgaaaccccgtctctactaaaaatacaaaattagcgggcgtggcggcgcatgcctgtaatcccagctactcgggaggctgaggcagaagaatcgcttgaacccaggaggcggaggttgcggtgagccgagattgcgccattgtgctccagcctgggcaacaagagcgaaactccagctcaaacaaaagaaatactaagtcctcaggacacagcctggaatgcaagaagcactcaataaatagtacctgttgctacgaattaccacatttttttaaatggtattttgggggtttgacgtgtagtttggggtaggaggcttttcgttttgttttttgtttttggatagtaccaggtttgggaagaatattctgagtcatacttaccttctaagctgcaagatgtcttttttaatttttctttgtcccctgaggtgcgggatgaaggggtttttttcttcctcctacctttttattctttttaatactgtcttgcttgtgtaacatcaaaatgaggcaagaaagagaaatcaatgaagtcatcttctcatcgatttagtctattcccaggtggccgaaaaggcaggaactgtgaactgaaaacttcatctggcatcagattttctttaattgtctctcgaacactcaccagtaagccagtgcttgctagaactctctagagccaggttgcactctcagcctaaaagaaaagtcttggctgaaacaaagaacagaaggatgggtggggacagaaaacctccctaaatgtgagaaaaggagtcattatttctgagaccaggccttgaaaccgaggtgcttgtctggttcacttgtttctttctttttgtttttgttttgttcagagacagggtctcactacgtcgcccaggctggaatacagtggtgccatcatagctcactgcagtctcgacctgctgggctcaagggatcctcctgcctcagcctcccaaagtactcagattacagacttgagccaccactcccagccctgtttgtttcttgaatagtcctttgcagaaaactggagacttatggactagggcccagctgccttcaaaagatgtttggggtccctttacaagtgagaggctatataggaatctgcaatttaagacaggcaattcttgcttacaaattggcatttctggaagtcagtgtgcctctagattatttataaaggacagtttgaaaccaattaagacagtcacttaatatgtcatatcaggtccgggtacactggcccatgcctataatcccagcactttgggaagtcgaagcgggaggatcacttaaggctaggtattcaagaccagcctgggcgacataatgagacccccgttgctacagaaaaattttaaattagctgggcatggtatcacacacctgtaatcctagctactcaggaggctgaggctggaggatcccttgagcccaggaattggaggcttcagtgagctgtgatcatgccactgtactctagcctagatgatggagcgagaatgtgtctctctttaaaaaaaaaaaagaaggcaggccgggcacggtggctcacacctgtaatcccagcactttgggaggccaaggcgggtggatcacctgaggtcaggagtttgagaccagcctggccaacatagtgaaaccccgtctctactaaaaatacaaaaattagctgggtgtggttggacacacctgtagtcccagctactcgggaggctgaggcaggagaatcacttgaacccaggaggcggggttgcagtgagccaagattgcaccactgcagggaggcggaggttgcagtgagccaagatcatgccactgcattccagcctgggtgacagagcaagactccgtctccaaaaaaaaaaaaaaaaaaaaaaaaagtgtatcaggttttcttggacatcactttgaacaggctagtaactactcagccgttttcatgtaatttttggtgagtcctgttcctgtaagacctaataaggagtgtgcttggctgtcagaggacaaagcctgtggcttacaggatttatgagagactgagtcacaaaggaagcacagcggcactggaaaaagtctggggtcttaggctgggtgcggtggctcaggcctgtaatcccaacactttggaaggccgaggcaggcgaatcacttgaggccaggagtttgagaccagcttggccaacgtggagaaaccctatctctactaaaaatacaaaaatagccaggcatggtggcaggcacctgtaattccagctactcgaggggctgaggcaggagaatcacttgaacctaggaggcggaggttgcagtgaactgacatcacaccactgcactccaacctgggcgacagagtgagatctgtctcattaaaaaaaaaaaaaaaaagaaaaaaaaagtatggagtcttttgtcccagtaaagtaatgcaggtgggatcctgacacctgttacgaaagctttgtcatctaacttgctcagagattgctcttgttttagtgttttttaaaaaaacaaaaaatttatagagacagggtctatgttgcccaggctggtctcgaacacctagcctcaagcgatcctcccacctcagcctcccgaagtgctgggattacaggcatgagccactgtgcctggccagggactactcttgaattcatgaaaccaagacaaaaccaacttttaaaaatcaccctgaggataggccactgtctgtgtttgttgctgagaatagggtatattttttccccctcaggtcagaactgttttgattttcaccgttcacctctttccatccatcctccaggtccccttgcagaaagagctctgcggcatacagtggccacagcgggccaggtgctcactaatcgatcgcacctctcagcagtgggcaggaggcgctaattagactctgagtagcttttgcagctgcacagaaagtgctggacagcacaagctgaaccccaagcaccatggccgtctgctgtaggaaaaaccgtagcaggagataaatatgtatccctgtctctctcggagccaagagcagagcgactaattcccaccatatgttgagctgcaaatcagatgttttgctctcctcccacagaaagaagcctgtccatcacaggtgtgagtttgttggttgagcaggtttattgagacgtaattcacagaccatacaatgcacccatttaagagtacaacccaggggcttttagtatattcagagtcaccgaaatggatcttagaaccccaaaaagaaacaccataggccaggcgcagtggctcacgcctgtaatcccagcactttgggaggccaaggcgggcggatcacctgcggtcaagagtttgagaccagcttagccaatgtggcaaaaccccatctctactaaaaatacaaaaattagctgggcgtggtggcaggcacctgtaatcccagctactcgggaggctgaggcagaatgacttgaacctgggaggtggaggttgcagtgagccgagatcaccctcactgttttccagcctgagtgacagagcgagactccatctcaaaaaaaaaaaggcgtcagaagatctgaggctctcccatccctggcaagcagacttctggcctctgggcagctggtgttttagggtacccaggatttgtcttaacccagtatggtgagactcacagacccagaaatgaccgtcaggaaggaagaagtttatattcacagtcctctggaagcaggaggcagggcacaccacacaggggccacatggggaagcaccagggtcagttgagggacagaggggaaaatatggacaggagtcttcattgtggtttcccggggaacaaatgggccaggcagggtgagcaggttcaggatggggccccgaggtgatgagggcagcgggaccgtggccaggagtgtgagagccccataaaggaggcaactgggggtctgagctctgcactgggtgcagaccctttactgtctctagaaactggcctgggaggggctgtgcatccatggtcagcaaagccccaagatgtcagagcatcacaaatccggaataaaaggacataatcaatacagcgggtctgtggcagggccactgactcatgtcttgacccatcagctatttcagtggccgcatgtgttccaggaagactcaatttatgactgtccacctcttattctatttcatttcattctttttcagagtcttgctctgtcacccaggctggagtgcagtggggcagtcatagctcaccacagccctgaaccccagggctcaagcaattttcccacctcagcctcccaggtagctggaactactggcacacaccaacatgcctgcctaattttttgttgttgttttttaagagacgagatctcactgtgttgcccagactggtctctaacctgctgtccctggtcatgaccccaacatgtgaaaacttcagtgtcttctaaatcatcaaaggagggtttacatatattcccatagatttagcattaccaatagtttattaaaattctttggaatcagcatttcttctttttttttttttttttttgccatcaacttgattttgggaattggcattgcttacatgctgttttttttgtttggttttttggttttagtttttttcaagacaggatctcactctgctgcccaggctggagtgcagtggcatgatctcggcttaccacaacctctgcctcccaggctccagcaattctcctgcctcagccttctgagtagctgtgattacaggtgtgcaccaccactgccaagctaatttttgtatttttagtagagacaggttttccccatgttggccaggctggtcttgaactcctgacctcaaatgatccaccccgctcggcctcccaaagtgctgggattacaggtgtgagccacaacacccagccagatgctatttttagtgactttttcttctatggactattgtattagagcagaattaatctgatttcagtcaagacctcagtccacaagcaaccatctgtcagccctgccaggatgctgctgggcaaaggatacatctcgggatttgcgccatatttgtacgtttaggtcataattgcctgggtggagttgagtgttgtacagaaatggcaagaaatgcctgtcctggaccgtgtcgcctttggtttaggattcctgtttttttacataggtgttgctttgtgagtgacatcttcaattgctttgtctcctataacaatagtaattgttagtcatgtgttatgacgtcagaatgtttctggcctctgaacaaatgtcatctttgctgtgctgggctgtggaaagaatgaacagctactgagtatatgtgcaatgtgctgttacacagcttagtggctgatgtcttaattggcaagaattcttgactcctctgccagaaaatctctaacacacactcacctgctcgttaacaatcaccttcaatttacagctaaattaaaagttgctcagaggccggctacggtggctcaagcctgtaatcccagcacttagggaggccgaggtgggtggatcacctgaagttgggagttcgagaccagcctgaccaacatggagaaactccgtctctactaaaaatacaaaattagccgggtgtggtggcacatgcctgtaatcccagctactcgggaggcaggagaatcgcttgaacctgggaggcagaggttgcggtgagctgagatcacgccattgcactccagcctgggcaacaaaagcggaaatccgtctcaaaaaaaaaaaaaaaaagttgctcagagaatgctgaatcctctcccaggagagctgctgcgagtacgttttccctagggtaagctctgcccaccccatggtttataactccgtgttcccaagaaagagacttctagctgctctcttcctgtaacatagacaaggcaatggtgtatcgggacctaggagccaggaggccacaggacagatcagatttcttttttttttctttttttttgtgagatggagtctcactttgttgttcaggctggagtgcggtggcatgatgtcagctcacggcaacctctgcctcccgggttcaagcgattctcctgcctcagcctcccgagtagctgggattacaggtgcccgccaccatgcccagctaattttgtatttttagtagagatggggtttcatcatgttggccaggctggtctcaaaatcctgacctcaggtgatccacccgcgtcggccttccaaagtgctgggattacaggcatgagccactgcacctgatctgacaaatcagatttctatttctcttctctaagctcctctcctctcctctctcctcccctcccctcccctcccctcccttcccttcccctctcctcttctctcctctcttctctcttctcttctcccctcccctcccctcccttcccctctcctcccttctcctcccctcttcttttcgagaaggtcccgctctgtcacccaggctggagtgcagtggcacaatcatagctcactgcagccttgaactcctgggctcaagcaatcctactgcctcagcctcccgagtagctgagactacaggcgtgcgccacttgtgctcagctatttttttattttgtgtagagacggggtcttgctatgtttcccaggctggttttgaactcctggcctcaagcgatccttccacctctacctcccaaactgctaggattacaggcgtgagccaccatgtctggcccagatttcttttttttttttttatttttgagacagagtttcactcttgttgcccaggctggagtgcagtggcacggtctcggctcaccacaacctccacctccggggttcaaacgattctcctgcctcagcctccctagtagctggttttacaggcatgtgccaccatgcctggctaattttgtatttttagtagagatggggtttctccatgttggctaggctagtcttgaactccccatctcaggtgatccacccaccttggcctcccaaagtgctgggattacaggcatgagccaccgtgtccggccgccagatttctttttaatgctgctctttgtccttacctgggcaaagctttaagatacaattttataaaatgtaagagtaaactagccaagtagcccatctcaactatgcttgtcaaataggaggggaaaactgaacctaatgaatgatggttgagctttatttattatttgtttattttttaggcggagtctcactctgtcgcccaggctggagtgcagtggcgcaatctccgctcactgcaacctccgactcccgggttcaagcgattccgtgcctcagcctcccgagtagctgagattacaggcatccaccaccacgcccttctaatttttgtattttgtattttttattttttttaagtagagacgggggtttcctggccaggctggtcttgaactcctgaccttgtgatcaacccacctcggcctcccaaagtgctgagattacaggcgtgagccaccgcacccggccatagttgagctttattaagtgttgcatcttgggaggcccaaagcaggaggaccgcttgaagtcaggagttcaagaccagcctgagcaacatagtgagacccccccccaacctctacaagaaaatatttttaaattatacagcacacctgtagtcccagctactcaggagactgaggcagaaggattgcttgaacctaggagtttaaggctgcagtgagctatggtcggccactgcactccagcctgagctagagtgagactgtctctaaaaataataataattaatttaaaaagttgcatctttccatgagtaggtgagcttgtcagcgggcacacgtatcctatgatctgaacccttaaattaatgaacagatgggtgtagacagcggtttgcagcccctgttgatgttgggttggtttataatcaccatatggaacagaatcggagcctcgcgtccacttcgatgctagaattctgttcgagtgctgatgaccaggggcggctaaacaccatgccctgccatctctgggtcttagagtcaccctaacatctgatctagattaattatcatcatgtgcgaggttttggcatgaagcacgccaggctcaccgtttcatgatcttagactatttacagcaaactcaaacagctcacttgctttttacaccctgcaaagaccaagggagagcctggaggggttgttttttttttctgttttattctatcaaagcagcaaatactgcaatttccacagtaaatggtcacagtggggaccaatatcctgccctccagacccgctgcttcagccaatacagcaagggaagacgcagctctgttttctagaaggatcccaccgaggcataaaaacggcgcagcccagcctggcgccgcgccgggtcccggagccccgggcgcgaacatggggaatgcgcactccaaaagcggggacaggcacagcgcgctccccggccgccccgagctgtctttttacggctctttccccaggaaatggagcgagaacgtcttcttggataacgagctgctgacctccaagatcctgtctgtgctgcggccgcagtcggagcggggcttccgcgccggggacctccgctacccgacccactttctcagcaccaactctgtccttgcctctgtcacagcctcgctcaaggagcacccccggggcaccctcctgtccgatggcagcccggccctgtccaggaatgtcggtatgacggtctctcagaaagggggtccccagccaacaccgagcccggctggccctgggacgcaactcgggtaagccagggtcccctctgtgccctcgggtgggtggtggcattccccggggagctgttgacagcctcttcggagggagaccccgacttagatctgtgtgaatccacacggcagcccccgtgctaagcagagaaattcccattaacgcttgcttccaggatccacgccttttttgcaaaaacgatgtgtcccggggtgtattcggcccctggtggagccagtttgcttagtgccctcgagggatccttggactcgctccttaggccgggctcctgacttactcaaggcgatgctcaaagtcctgctgggtgtgtggaggcggcgtcccattatctgtgccttacctcgttttataggacttcaaagtggttcccttgataatgcctgcagcggtgtccgggtagaaagtgatgctagaagctgatatgtttgtggtgactattccatgagttcgtgggaaagggagtaaattatcattttcctctgagtaaggactgccctcccaccttgaccatgaaaccatttccacttaactcctggtagacaggatcccaggggccccaagtgggctccagtggtctgtcaaggaagctgcaatccacaccccgttagaacgtaactaaacattaaaggaagttactatggaagaaatcctgatgtgacattgacagataatcttccccaccccccgccccccaccacttttttttttttttctttagacagagtctctgtcgcccaggctggagttcagtggcacaatctcagctcactgcaacctccacctcccagattcaagtgattcccctacctcagcctcccaagtagctgggattacaggcacctgccaccacacccggctaatttttgtatttttagcagagacgggattttgccatgttgggcgagctggtctcgaactcctgacctcaggtgatcctcctggctttggcctcccaaagtctgggattacaggcgtgagacactgcacctggcaaatctcccaatttttaaaaatgatctgtagacaaagttgaggcttctgtgaaaatgtggagagttctcagagagtatcgaatcggatggagtcaccgatgtgcctttgttgcatgaggtcgtgtgtgtttaattcacttttctaaaacaattgtttttattgtttgcactcagaccaatcacaggagagatggatgaagccgattctgcgtttttaaaatttaagcagacagctgatgactctctgtcccttacatctccaaacaccgagtccatttttgtagaaggtatggtcatctccgctctctcgcggctgccacacagttcctgtctctcctgggaagagctggggctcgtgtcagcatgtctacgggagggaattggggtggcatggctctgggcccccagcagccacacctcgctcttccctcagatccctacaccgcctcgctgaggagtgagattgagtcagacggccacgagtttgaagctgagtcctggagcctcgccgtggatgcagcctacgccaagaagcaaaagagggaggtggtgaaaagacaagatgtcctttatggtgaggagtccacagccctgtgccatcacaccggccctccactctcttctctgctccctcccttcctccctcccttccttccttccttccttccttccttccttccttccttccttccttatctttttctttctttctttctctctttccttctctcttttgtcctctttctctctttctttctttcttttttttcttttttgagacacagtctctctctattgcccaggctggagtacagtgggacaatcagagctcactgcagcctcgacctgggctcaaacaatcctcccacctcagcctccctagtagctgggaccacaggcatgggccactacacctggcgaatttttttattttctgtagagttgggggtctcaccatgttgcccaggctggtctcaatctcctgagctcaagtgacccgcccgcctgggcctcccaaactattgggattataggcgtgagccacggtgcctggcctctctctgtctttctctctcctctcttggtgcagccctgcctcccatgccaggaaagagactgtcggagaggattttgttataatacgtccctgtgaacatgtctggctgaatgcccaggtctggcttcttcttcccttgttggtggctgtcttagcctatataggcagctctcatagaacaccatacacagggtggcttagaagccacagaagtttattgcttacagttctagaggctgggacgtctaagaccaaggcggcggcagacttagtgtccatgaaggccccatttcctggcttcctgctggtggcatctggctgtgtcctcacaaggtcttcatggtctttctcaggtcctcttttttctttttttgagacagggtcttactctgtcacccaggctggatgcagtgatgcagtctcagctccctgcaacctccacctcccaggttcaagcaattgtcctgcctcagcctcccgagtagctgagatgacagtgcctgccaccatgcccagctaatttttttttttttttttttttttttgagatggagtctcgctctgtcgcccaggctggagtgcagtggttccatctcggctcacctccacctcccgggttcaagcaattctcctgcctcagccttccaaatagctggaattacaggcgcccactgccacgcccagctaatttttgtatttttagtagaggcggtgtttcaccatgttggtcaggctagtctcggactcctgacctcatgatcctcccaccttggcctcccaaaatgctaggattacaggcgtcagccaccatgcccggccatgcccggctcatttttttattttttggtagagacagggtttcgctgtgttggctaggctagtctcgaactcctgacctcatgtgatctgctcacctcggcctcccagagtgctgggattacagacgtgagccaccacccttggccctcaggtccttttcctaagggcaccagtcccaccatgaggttctctccccttaggacctcatcaccttccaagggctgtacctcctgatactatcacctttggggttcgaatttcgacatacgaattttgggggacgcaaacatcttgttcattgcagtctaggtctggtcagggacacacacagatgtgatggatgagttttaacagccacaggagtgttcctcagaacactcttcttcctaaaacagacttgatagccaggcgtggtggtgtgcacctgtaatcccagctacttgggaggctgaggcaggagaatcgcttgaacccgggaggcggaggttgcagtgagctgagattttgccactgcactccagcctgggcgacagagcaagactccatctcaaagaaaaaaaaaaaaacacggacttaaaatgtcgtccgttgggttgacactgggcgcaaaaccctcccgtgatggggaggcccagggttctctccttcccctgctccttcaggctgggatcccccgcagcattctaaaccctggacaccctggaagtaagaaagatcccaaaggcacaaggtcttaggcagagaactctcagaagccagttcagcacgtgaagggcaggcagcacccacgactgcccagcggggccgtggagccagcatggctaagtcctgccgtctgtgtccctgcagagctgatgcagacagaggtgcaccacgtgcggacgctcaagatcatgctgaaggtgtactccagggccctgcaggaggagctgcagttcagcagcaaggccattggccgcctcttcccatgcgctgacgacctgctggagacgcacagccacttcctcgctcggctcaaggagcgccgccaggagtccctggaggagggcagtgaccggaattatgtcatccagaaaatcggcgacctcctggttcagcaggtgggtgcagccgtgttcatctcaacagtcttcaaagcctctgccttgtctctgttcctttcttctttttttctgagatagggtcttgccgtgtcgcccaggctggagtgcagtggtgcagtcacagctcaatgcagcctcaacctctcaggctcaggtgatcctcccacctcagcctcccaagtagctgggactacagctatgcgccaccatacccggctaaattttattttttgtagagatgaggtctcactctatggcccaggctggtcttgaactcctgagctcaagtgatcctcctgcctcagccttccacgtagctgggactccagggaacaccatgcctggctaactttttattttttgaagagatggggtcttgctttgttgcccaggctagtctcaaattcctggcttaagcaatccccctgcctcggcatcccaaagtgcagggatcacaggcatgagccattgtgccagccttttcctttcagtaataaaacgagagtggcccctgaggacacacagttctgggccccttacagcgatgcctgcagttcatattctagaaacacagagacctaaattaggcagtgtccctggctgaacactattcaatgttacattcttctgtgctcttgtttggttggttggtttttggtttttggttcaagtcacttatgctttcaaccgttcaaagcttacctgttgactgagtgcagtggcccacacctgtaatcccagcactttgggaggccaagcaggtgaattgcttgagtccaggagttccagaccagcctgggcaacatagcaagaccccgtatctacaaaacatgaaaataaattagccagctgtggtggtgtatagctgtagtcccagctactcaggaggctgaggtgggaggatcacttgagcttgagaggtcaaggctgcaatgagctatgatcatgccactgccctccagcctgggcagcagagtaagaccccaatttgggagtgggggaaagcatacctgtgaaccagcaccaaccgtggtagtggtattaaccccaaatgatcaccctaggccaagatttacccaggggagctgtgcccttcatgtgacctcaaactatttgctcgaagcatcctgggccaactaattagaagaacactccttttgctttttatgtttctttttttgagacaaagtctcactctgtcgcccaggctggagtgcagtggtgcaatgtcggctcactgcaacctgcacctcccaggttcaagcaattctcatgcctcagcctcccgagtagctgggattacaggtgcctgccaccacacccggctaattttttttgtatttttagtagagacagggtttcaccatgttggccaggctggtcttgaactcttgacctcaggtgatccgcctgcctcagtctcccaaactgctgggattacgtatgtgagccactgcgcctggcctgctttttgtttctaacgtcctttggctgaaatttactttttttctcggctctcaggaagttgtacagcatctgtgatgcagcaaagccccgaagcagaaggtttttttatttcacctttatgacaccttgcgattagacaccccaaactgaagcatttctctgtttgaggacatattagaaaatggaactgcagccaggcactgtggctcacacctgtgaccccaacactttgggaggctgagtgggggtggatcacttgaggttatgagttcaaggccagcctgaccaacatggtcaggttagccaggtgtggtggtggcacctgtaatcccagctactcaggaggctgtggcaggagaatcactcagacccggaaggcagaggttgcagtgagccaagatcacaccactgccctccagcctgagccacagagcaagatgctgtctctaaaaaaaataaaagaaaatggaattgcaaataaatctaatatttattttagcagagtcagacaaattagatgaaaatatactttggctggccaggcgcggtggctcatgcctataatcccagcactttgggaagatgaggtgggtggatcaagaggtcaagagttcgagaccagcctgaccaacatggtgaaacctggtctctactaaaaatacaaaaattagcagggcatggtggcatgcccctgtaatctcagctactcaggaggctgaggcaggagaatcgcttgaccccgggaggtggaggttgcagtgagccaagatcacgccactgcactccagcctgggcaacagagtgagactctgtctaaaaaaaattagccaggcgtggtggcggcacctgtaatcccagctacttgggagactacagcaggagcatcgcttgatcccgggagacagaggttgcagtgagccaagatcgcgccattgctctttagcctgagccacagagcaagatgctgtctcaaaaaaaaaaaaaaaagaagaagaaagaaagaaaatggaattgcaaataaatctaatatttattttagcagactcagacgaattagatgaaaatactctttggcagttttcgtgtttaattaacatttccatccttttgtttatcagttttcaggtgaaaatggggagagaatgaaagaaaagtacggtgtgttttgtagtggccacaatgaagctgttagtcattacaagttgctgcttcagcaaaacaagaaatttcaaaacttgatcaaggtaaaaacaatttttttttttaatcaaaaacttatattctggccgggcgcagtggctcacgcctgtaatcccagcactttgggagtctgaggcgggcggatcacaaggccaggagatcgagaccgtcctggccaacatggtgaaaccccgtctctattaaaatacaaaaaattagcctggcatggtggcacgcacctgtaatcccagctacttgggaggctgaggcagaggaattgcttgaacccaggaagcaaaggttgcagtgagccgagatcgtgccactgccactgcactcgagcctggcaacagagcaagactctgtctcaaaaaaaacaaaaacaaaataacaaaaagcaaaaaaaaaaacttacattcttcactgtggggtttttccacagaattgtagagtcttgagacttgggaattaaaaggcatctgttatgtagcagtgatttttcaaggtttggtttgggttttaactacaaccccattcagaacacgtcagtgaaatcttacatagaatcctgagatgtaaaataaagcgggccagatgcaatgcctcacgctgtaaatccagcacttcgagaggccaaggcaggaggatcacttgaggccaggagttcgagaccagcctgggcaacatagcaagatcctgtctctaagaaaaatttaaaaattagccaggcatggtggtgcacacctgtaatcccagctactccagccgctaaggagggaaaatcagttgagctcaggagtttaagagcagcctgggcaacatagcaagatcccatctctattatataagatacatatgtatacacacacacatattaacaaaatcaatcaaagaaagcatatctagactttgttccttaccaggccacggtggcccctgagagacccctgcagctcagtatgggacctgctgaccaccactttgtgtcatcactgtttggatgacacaaagggtcgtttgaaggggctgccctgccccaggaactgggcctccagatccagcctgtcttgccttggggatgccgtctgtctcaaggagggttactccagatgggcacggtggctcacacctgtaatccctgtaactttgggaggccaaggcgggcagatcacctgaggtcagaagttcagtaccagcctgcccaacatggcgaaaccccgtctttactaaaaatacaaaaaattagccaggcgtaggccgggcacagtggctcatgcctgtaatcccagcattttgggaggccaaggcgggtggatcacgaggtcaggagatcgagaccatcctggctaacatggtgaaacctggtctctactaaaagtacaaaaaattagccaggcgtggtggtgggcgcctgtagtcccagctactcgggaggctgaggcagaagaatggtgtgaacccgggaggcggagcgtgcagtgagctgagatcgcaccactgcactccagcctgggcaacaagagcgaaactccgtctcaaaaaaatacaaaaaaaaaaaaggagggttactccaaacttttgtccccttgctggtccatgttcgcccccggagcgtgtagaatgatcttcctgcctcctttgtgtgagcgtgggtaggtgctcgaagcccagccggagtcagccaagtcaagggagaccccacctcccacgtcctagaaaccacacttggatgatggctagttggttctatcaacattcacctctttagaggccctaacactgctgattccacaagagctgcatcacctgtggcctggccaggacttggttctgcagtggcattctacacccagtggtccaaagttaggagtgacatgcgtttaaacttcattgcattataggtaggtaggaaagggggaggatcgttttggagccgcagttcctcaaagccaggagggggattccaatgaaacctccgtccacggactcttgcaaatcccacagcggctccgggcctcttcagtggctctctgcaagtgctggcatccctcaaatgcatacaagagcagcgggagcaaacaagcagaaaatgtgctatgctcccgagagagtgtcaggtgaccccttttggttcttagccagaggtgagcatcagaaagcacccaggctgggcgtggtggctcacgcttggaatcccagcacttttggggaggccaaggcaggcggatcacttgagcccaggagtttgagaccagtctggggaatatggcgaaacctcatctctactaaaactacaaaaattagccaggtgtggtggcgcacacctgtaatcccagctactcggaggctgagacaggagaatcgcttaaacttgggaggcggaggttgcagtgagctgagatcacacccagggacccattcaaaaggcacaggcccactctagttctggagggttccagcagtcatgggttagggggtgtgtgttcatgtgtacattgtgtgtgtggacagcttgacagatgatttccataataaccccctggctggttctcatttattttatttttttagagtcagggtcttgctctgtggcccaggctggagtgcaatggaagaatcatggctcactgcagcctcaaactcctgggctcaagcaaaacctcctgtctctgcttcctgaatagctgggactacaggagtgtgccaccatgcccagctaatattttaattttttgtagagatggggtcttgctgtgttgcccaggctggtctcaaactcctggtctcaagcattccttccaccttggcctcccaaagtgctgagattacaggcatgaaccaccacatctgtcctttggtggcctttgtatatacagcaggtgatccctgcgttcaggtatctggtgtctgtctcctccaaagtggcaaaggaaaggtcctggtgagctgagaaaggaaggagcccccagccttggcagccgattgttgacaaattgggcagaaaccgagatgttaatgcaggatcttgctgtccatttccgagatgttaatacgcaatcttgctgtccatttccgagctgttaatgcggtatctcgctttctgtttctgagatgttaatacaggctcttgctgtccatttccgagatgttaatatgggatcttgctttctgtttccatttccaagacgttaatacaggatcttgctgtccatttccaagatgttaatgcgggatcttgctgtccgtttctgagatgttaatacgggatcttgctgtccgtttccaagatgttaatgcgggatcttgctttccgtttccgtttccgagatgttaatacaggatcttgctttccgtttccgtttccgagatgttaatacgggatcttgctgtccatttccgagatgttaatacaggatcttgctttctgtttccatttccgaggtgtgaatgtcgatcttgctttctgtttccaagacattaatatgggatcttgctttccatttccatttccaagatgttaatacgggatcttgctgtccatttccgagatgttaatgcgggatcttgctgtccgtttccgagatgttaatgcaagatcttgctttccgtttccgagatgttaatgcgggatcttgctgtccgtttccacggtgttaatgcgggatcttgctttccgtttccgagatgttaatacggggtcttgctgtccgtttccgagatgttaatgcggcgtcttgctgtccgtttccgagatgttaatgcggggtcttgctgtacctttctgagatgttaatgcaggatcttgctgtccgtttccgagatgttaatgcgggatcttgctgtccgtttccgagatgttaatgcaggatcttgctgtccatttccgagatgttaatatgggatcttgctgtccatttccgagatgttaatgcgggatcttgctgtccgtttctgagatgttaatacaggatcttgctgtccgtttctgagatgttaatacaggatcttgctttctgtttcctagaaaattggcaacttctccatcgtgcggcggcttggcgtgcaggagtgcattctcctggttacacaacgcataaccaaatacccagtgctggtggagcgcatcatccagaacacggaaggtaggccttctccccactgccccgcccgcccgtgctgctgcagcacagggctctctccgtgtacccactccctatttgagcagcaaactgaataaattccctttgaaatccagtttgctgggtgctggggttccttccttttttttttttttttttttaagagacagagtctcactctgttgcccaggctggagtgtagtggtgaaatcatagctcattgcacagcctccaactctggggctcaagtggtccttctacctcagcctcccaagcacctgggactacaggcatacgccactacacacagttaattttttttaattttttttttagagatggggtctcgctgtgttacccaggctggtgtggaactcctgggttcaagtgatcctcccacctcggtctctccaaagtgctgggattacaggcatgagccatcacatctggcctgggtttttttgttttgttttgttttgagacagtcttgctgtgtccctcaggctggagtacagtggcacgatctcggctcactgcaacctccacttcccaggttcaagtgattctcctgcctcagactcccgagtagctaggactacaggcgcccaccaccacacctagctaactttgatatttgtagtagagatggggattcaccatgttgatcaggctggtcttaaactcctggcctcaaatgatccacccatgttggcctcccaaagtgctgggattacaggcatgagccaccatgccacgcccagcctggcctggggcttttgatacaagaaagatggggtggtcagcaccatgaaagcaggagccaggtctcatttgccaactgtttcccccagcccctagcacaggctgggccactgcaggccctcagtgttagtgtctgtggaaaggatgaatggatggagacggtgccctggtggttcaaacagacccagagatggcctctgtgtcacatgaccagggctgagcaagggatgtgtctggagccagggaggcagagaagggcgggcagtccagccaggagttctggcagccagggccgtgctgaccacagctctcgcttcaccactgaattcaggccgtgagaggatgaacaaatttccccactataaaagccacatccttggagtgggaagagccagatcccagtcacaacaggaggtggagggaatctaatttatttatttatttatttatttattgtaagatggagtttcactcttattgcccaggctagagtacagtggcatgatcttggctcactgcaacctctgcctcctgggttcaagtgattctcctgcctcagcctcccgagtagctgggattacaggcatgtgccaccacgcctggctaatttttatatttttagtagagacgaggtttcttcatgttggtcaggctggtcttgaactcccgacctcaggtgatctgcccgcctcagcctcccagagtgctgggattacaggcgtgagccaccatgcccagctgggagtcttttatgaagggattgggacagaggaaagttcgtttaccaagcagtagatggcagagctagtcatggcagttttgccacttgaattgcaccttagcttctgcattcgatagatgctctacctaggtaaaaattcagctctgggccaggcacagtggcttatgcctgtaatcccagcactttgggaggctgaggcaggcggatcacttgaagtcaggagtttgagaccagcctggccaacatagtgaaaccccgtctctactaaaaataccaaaaaaaatagctgggcatggtggcgggtgcctgtaatcccagctacttgggagactgaggcaggagaatcgcttgaacctgggagacaggttgcagtgagctgagattgcgccattgtactctagcctgggtgacagagccagactccgtccaccctaccctcccccccccaaaaaaaacctaaactctgacgtgttgcatttattttggagaactatttgcatctcaggagattacatttgggaagtgatcttgagggtcttctgagtggtggccttggagaacacacctcatagatcccacacgcccatacatagtgtgtccacacacctcatagatccacatgtccatacatagtgagtgtgtccacttctgttgtgttaaagtggaaaagaaagacgctaactctgctatgtgtggcagctggcactgaggactatgaagacctgacccaggccttgaacctcatcaaagatatcatctcacaagtggacgccaaggtcagtgagtgtgagaagggccagcgcctcagggagatcgcagggaagatggacctgaagtcttccagcaaactcaagaacgggctcaccttccgcaaggaagacatgcttcagcggcagctccacctggagggcatgctatgctggaagaccacatcagggcgcttgaaaggtaaaggcctgcccctgcccacctctagtgggtgccatcttggatcagtgggcactgtcttggagtggtgggcactgtcttagattagtggcaccatcttgtatcagtgggtaccatcttggagaggtggtcaccatcttggattggtgggtactctcttgattggtggcactatcctgtatcagtgggtaccattttggagtgttggttcccattttttattggtgggtgccatgttggattggtggcattatattggattggtgggtgctatcttgggttggtagcaccatcttgggagttgtgggtgccctcttagagtgatgggtgccatcttggatcagtgggcatcatcttggattggtaggtgccatatgggattagcagcaccatcttggagtggtggcaccatattggattggtgggtgccatcttgggagttgtgggcaccctcttggagtggtgggtgccatcttggatcagtggcaccatcttggtgggttccctcttgaatcagtgggcacaatttgggttggtgggtgccatcttggattggtggcacagtcttaggaatgatggcaccatcttagatcactgggtgcctcttggatcagtggcatagtcttggaaatagtgacatcctggatcagtgagtaccatcttggatcagtgagcaccatcttggaatggtggcatcatcttgatcagtgggctccctcttggatcagtggccaccattttgattggtgggtgccatctcggactggtggcatggtcttgggagtggtggcatcctctcagatcagtgggtgccctcttggatcagtgggcaccatcttggtttggtttggtgggtgtcaactgacacagagccactgaagtctggctacttcatggctgaagggaggttatgagctgagtcaggatgagcaaggcagctggggtgtagcataaaagagatggttgtatcaccgtcctcctcctctggtctttggaagggtgcagtacacaccaggagggcatgctgagttgttgacttcccaatggaaacccagggcattggtggcacatcgagacaccccaggtttgggcccagaattccaaacacgctcagctgcccatctgggcagtcatgggccagcctgcctgccatgggcccagccactgagaggcccccatgtggatagagaatacccccaggactgctgatcagcatccccaagcatcccactcgctgcccagggtgtgctccgagccctactttcaagacccatgttgcagttcagaccagagagtgctcaggattcattcctgggtttcctgttcatttttggagcctctagaaacatcccaagctatctattcacatcagcatctttaaggatcttgagggagtcattgaggtggccaaatgacagcacttgcccactcatcatttgagtaggcgtgtatttcgcagacaggtttagcgccttctgcctgccaggcgccgagttggatggtaggaatacaccccaccgggcaagacctggtgcctagccttttaaggcatcagtcactgggctgaaagagagaaacaagccaaaaaacggaaaaactagttagaagtccagcacatgctttaaggaagccagcaggctgcagtgtgagagaattagcaaaagcgtatctgacttagacaggggtgttggaagcagctccccaaaagtggcgttgcccttgaaacgcagctcaggatttgcatctatgtgcaggaagccttacagcacgagaggttcatacagggacaaggcgccaagggggactgaggggcacgaggggactgagaccacccctggcctgcatcgctgctgtggctcgggtcctggtgacccaggagcagggagaacagagagctccgttcacatctgagacatcagagggagagatgttgtattagtccgtgttcatgctgctgataaagacatacctgagactgggcaacttaccaaagaaagaggtttaatggacttaaacagttccacctgtgggggaaggcctcacaatcatggcagaaggcaggaggagcaagtcaagtcttacatggatggcagcaggcaaagagagagggagcttgtgcagggaaactcccccttataaaactgtcagatcttgtgagactcattcactatcacgagaacggcatggaaaagatctgcccccatgattcaattacctcccaccaggtccctcttacagcacgtgggaattcaagatgagatgtgggtggggacgcagccaaaccgtatcagattctcaaaggtcagacccagcaggtgttgttacagcaaagagaattgccgggcacagtggcctgacatgggcgggagccctggtttgagctctggacacggaagggacttagaggaggctccggctgctcgttggtgctgaaggttgagacctggaaaggtgatggggggtgcaggcaaggcagaaaggaaacttctaggcccaggcagaagcatcatgctgcttacaccttcctgggaagtggcatccgcgggggtggccagcaagacctcctggctatgggacttttaagatgcatccttccatgctgttttcccagatatcctggctatcctgctgaccgacgtacttttgctgctacaagaaaaagatcagaaatacgtctttgcttctgtggtatgtatcctgtctcttcagacgaagggtcggctgggtgctgtggctcacgtctataatcccagcactttgggaggccgaggtgggcagatcacttgaggtcaagagttgaagtccagcctggccaacatggtgaaacctcacctctactaaaaatacaaaaattagccgggcatggtggcccatgtctgtagtcccagctactcaggaggctgaggcaggataatcacctgaacccaggaggtgaaggttgcagtgagctgagattgtgccactgctctccagcaagactgcgccactgctctcccgcctgggcaacagagcgagactctatctcaaaacaaaaaaacaaaacaaacaaacaaaaaacagacgaagggccctgcttgctgtgaccttgttgggaggttggctgaaactgcccatggaaggggcacctgtgagttttccaggcccacatagctgggattacaggcgcccgccaccacgcctggctaattttttgtatttttagtagagacggggtttcaccatgttggccaggctggtctccatcttctaacctcaagtgatcctcccgccttggcctcccaaagtgatgggattacagtcgtgcgccaccgtgcccagctgctggtgtgttcttaaccagtgtatttgtttgctgaggctgctgtaaacaaagtaccatggactgggtggtttagaccacataaatttattgtctcatgtttctgcaggctgaaagtccaagatgaaggtatcagcagggttggtttcttctgaggccccttggcttgtaggcagccatgtgctcatctgttctctgtgtcctcgagtggccatccctctgtgtgtgcctctgtgctaatctcctcttgttagaaggatgccagtcagattggatttgggcccgcccatatgatctcattttgccataatcacctctctttttttttttttttttttttttttttgagacagtctcactctgtcgcccaggctggagtgtgcaatgacacaatctcgactcactgcaacctccacctcccgagttcaagtgattctcctgcctcagcctcctgagtagctgggattacaggcacctgccgccacacccggctactttttgtatttttagtagagatggggtttcaccatgttggccaggctggtcttgaactcctgaccttaagtgatctgcctgcctcagcctcccaaagtgctgggattacaggagtgagccaccacacccgcacattaatcacctctttaaaggccccatctccaaagacagccacattctgaggtgctagggctcaggacttcatatgaatttgtggggaacacagtgtagcccactctagccagttaaaatgtgcattttgctggtctgtggaagcattgtctcttgaaggatgcgtgacagactagaaataccggtggctctgggtggcctgaggcacaagacagagatgggtttatctgttgttatatactacataccgttgtatcttttgagctttctcgtgtgtatgtgcattgccgactatttaaaaaaaaatttttaagctgatgaaattgacacattatcgggatactaaggggcaagatggctcactcctgtcatctcagcactttgggaggccgagataggaggatcacttgagcctaggacttcaagaccagcctgggcaacatagtgagatcccatctctacaaaaaatacaaaaattagctgggcctggcggcacgtgcctataatcccagctactcaggaggctgaggtgggaggatcacttgagcccaggaggtcaaggctgcagggaacaatgattgcaccactgcactacagcctgggtgacagagcaagacctggcctccaagatagtttaaaaaaaaaaaaaaaaaaaaaaaggtttctaggatttcactgcaatagtatcttttttcccccagatggcaaaatatttccgctttgaattgtttgaaaagaaatgaggagcgtgacccccactcttagttcccctcaccaggcccttgacctccctgctgtttgggtgctgtggggtaaagggtgacctccccaatgccctctactcatgcaggactcaaagccacccgtcatctcgttacaaaagctcatcgtgagggaagtggccaacgaggagaaagcgatgtttctgatcagcgcctccttgcaagggccggagatgtatgaaatctacacgagctccaaagaggacaggaacgcctggatggcccacatccaaagggctgtggagaggtgaggagggcctgggggtctccccacccactgtgttccttccgctgattggtccacccttggcttcgaccgttggccatcagctgtgaccttgaactccctcatcccagcttgggacccatgacgccattccagctccttctgatgactcaacctgttggacgttgaggccaacgggcccagaaaggcagctgtaacctgggcctttctgcatgcgtgggccactgcacctgccatggcgggctctctgcattctagggccagatttgttggagcagggcatggcatcttgtccttcctccttgggccgagcacccctcagggcccagaaccagctggcttcccctccctctctttattttttatttttttgagacagagtcttgctctgtcacccaggctggagtgcagtgatgcaatctcggctcactgcagcctccgcctcccaggttcaaacgattctgctgcctcagcctccccgagtagctgggattacaggcgtgagccactgcgcccagcctattttgttttgttttgttttgttttttagagtctggctcttgctctatcacccaggctggagtgcgctggcacaatcatagcttattgcaacccaaactcctgggctcaagccatcctaccccctcggcctcccaagtagcttgaactacaggcatacaccaccacacccagctagattttttatttttgtagagatggggcctcactgtgttgcccaggctggtcttgaactcctggcctcaagccatcctcctgtcttggcctcccaaagtgttgggattacaggcgtgagccaccatgcctgtccactccctctcttgattcccggaggcttcctggtgccttaatctggttcagactcccccatccacagtagctgtagctctacggggcttgcagccacccacctgcacctggcaggtcctctgcaagcccgctgtcccctggactcctcctctaagtcacaggcaggcatgtaaagcctcttcctggttatgccctggcgctttggggcgggatgaatgtcagtggctctctctcttcccctcctcgtcctcctgcaccacgaacaagctaaatcactcccaaagtcagagacggtcgtggcggctggttctgcagaaccagcgtctgtgccgaggctggcctgcctgggaagcacagttacccacccgactcctctccctgcagctgccctgacgaggaggaggggcccttcagcctgcccgaagaggaaaggaaggtggtcgaggcccgcgccacgagactccgggactttcaaggtgagcgggagacagcgtctgggcacaccccttgtgtggtgagccctgggccctccatcaggactggccacagagggtgaactgccccccaggtgacccggtgttttcccgtgggctgtgccatgtcctgcagctctgtgaagcattagaacgggctgtgccatgacatagcgatctccagaggtcacttagccctttgggggtatgtgggagagggagggaggagagcccagaggacctgagccccttccagagccgaccacacagccacacacgccaccaccaccccatcctcgtgcagccaggagctcaacagggcatcccagtcccatacgaaggaatagcacagggtccccacagcctccttccagagcttcctcctccctgtttaattacacgattgagatgtaattcacacaccacagcactcaccctcccaagcgtggggttcaggggcatttcagtgcatttccaattatgcagccagaatcatgttaactttagaacatcccaccaccccagaaagaagccccgtcccccttaacagtcactccccaccccatgccccaaccctggcaacaggaatctacttcctgtccctgtagattggcctgccctggacattccacataaatggagtcacaccgcgcggccttttgggtctggctcctctcgaggtgtggtattaaggttcgcccgcgctcagtgagcactttgtcaagaacaattcctggtgccctgtagcctgcggcaagctcccttcttccctttcactgtctgtatttttttttattttatcttcttttttttttttaaacagagcctcgctctgtcaccaggctggaatgcagtggcgtgatctcggcttactgcaagctctgcctatcaggtccaagagattctcctccctcagcctcccgagtagctgggactataggcacccgccaccacgccccactaatttttgtgtttttagtagagatggggtttcaccatgttggccaggatggtctcaatctctcgacctcgtgatctgcctgcctcggcctcccaaagtgctgggattacaggcgtgagccaccgctcccggccctgtattattcatttctaaattggataatactcaaacaataagtggcctggtatggtggctcatgcctgtaatccctgcactttgggaggctgaggcagatggatcactggaagccaggagtttgagaccagcctggacaacatggcaaaaccctgtctctacaaaaaatttaaaaattaggctgggtgcggtggctcacgcctgtaatcccagcactttgggaggccaaagcaggtggatcatttgagatcaggagtttgagaccagcctggccaagatggcaaaaccccgtttctactaaaaatacaaaaaattagccaggcatggtggtgcgtgcctatagtcccagctactcgggaggctgaggcaggagaatcgcttgaacccgggaggtggaggttgcagtgagccgagattgtgccactgcactccagcctgggcgacagagcgagactccttctcaaaagaagaaggaaggaaagaaagaaagggaggatggaaaattcagttttctaaggctctaagttggtcccagactaataaatgggcctgatacaatcctcactcacaccctactgtgtttgattttattttatttcttttagagacaggatcttgctttgttggccaggctggagtacagtactgcagtcatagctcactgcagccttgaactcctgggctcaagcgatcctcctgcctcatttcccaggcatgcaccaccacaaccagctaattttttatttgtagagacagagtctcattatgttgtccaggctggtctcgaactccaggccgcaagagtcctcctaccttggcttccctaagtactgggatcgcaggcctgagccaccacagctaacctgatttttataacaagggggaaaataatcagaggacaaggccatgccctcccctacctcccaggaatgcaggacacaagggggcagcctacctcagggcagggccagcggggttcctcatccttaggccagtccccggggctcagatgattccagggaaggccgacccggctgactgccacctccaccatcactctgcagagcggttgagcatgaaagaccagctgatcgcacagagcctcctagagaaacagcagatctacctggagatggccgagatgggcggcctcgaagacctgccccagccccgaggcctattccgtggaggggacccatccgagaccctgcagggggagctaattctcaagtcggccatgagcgagagtaagttggctgcccacacctcaagggtgcagtcttgccggggtgggctcctcagggaaccccaggccaggctcacggctcattgtggccgacacggcaccctgtccaggacaggcttctatgtggggggggcccaggagcagcactgaccgccccccggtgcctgtgagagccagaagggccttagacataatctgggccaagccgctccttgcagacataaagcactttctccccgttcaacaaccgctctgatgctccctgcatgcagaggctctaagccgggccgtggggaggatctgaagttgactaagactggttccctacctaccagaggttcctcttcttcctgggaggtgggtcctggtgatatccccagaaaaacacacgcacactccctcagtgggtccccacgcacagctctaacacagccgccaggcccctgggctggccgcttgagcaggcagtcagcgcccagtctgctctttctttttttcttttcttttttttttttttttttgagatggagtctcgctttgtcacccaggctggagtgcagtggcgtgatctcggctcactgcaacctccacctcctgggtttaagtaattctgcctcagcctcctgggtagctgggattacaggcacccaccaccacgcccagctaatttttgtatttttcgtagagatggggtttcaccatgttggccaggctggtctcgaactcctgacctcagatgatccaccctcctctgcctcccaaggtgctgggattataggcgtgagccaccgcgccctgcctcaatctgctctttcaacagtgagggaagccgactcagcccctgccttccagagcctttccgcagaataagacggcagagacgggggtcagtctttctccctccaggcccactgacatccttccacccggctccagtggccattgttcttggccccctggggacactctcatatcccgcaccttggcctggaatgttcttgtccccacctctgtgcctggccacagcctgttggtcctagagggctttctgtagacagcccttccccacaaagtcactctcccatatggccattgtcacacaatcagtgtatggtcattgtcatataacacaccaagtgtttcctgctggccctgggcagggccacatccagcattcgccagcccctggcccagggcggcctggtggaaggagctgcaggagcctgtacccgccctccccatggctgccccacagccctgtcctctcacttagacgcagattggcctgtcctggtggccatacctgaagtaagggtgtgcgcagggacagtggggctgaaatcccacggcacacagaagggggcaggcgatcaccaccccagtgagtccctccgtccacccgggtctcgctgccccagcgctccgtattcccccagcacacttccgcagggcgacccgtgcctcctgtccccttccttccacagtcgagggcatccagagcctgatctgcaggcagctgggcagcgccaacggccaggcggaagacggaggcagctccacaggcccgcccaggagggctgagaccttcgcgggctacgactgcacaaacagccccaccaagagtaagagcggggccgtctcccctcctgcctccagggccgcccctcaggatgcacattaacttgtatggggtttcctagaactttcttttttgttgttgttgagacagagtcttgctctgtcacccaggctggagtgcagtggcgcaatctcagctctctgcaacctctgcctcctgggttcaagtgattctcccgcctcagcctaccaagtagctgggactataagcacacgccaccatgcccggctactttttgtatttttagtagaaatggggtttcaccatgttggccaggctggtctcgaactcctgacttcaggtgatccgcccgcctcagcctcccaaagtgctgagattgcaggtgtgagccaccgcacccagccgattttctggaaccttctgaaaccctccagacatcgttggttgtgttgtgacagcagcacccagaccagcctgcccctctccagcaggcgtctgtgctgcagacgccaccattcgggcctagcctgggtttcctacctgggcaggggctgggggtggactgggaagcttccccctccccacgggatggcagcatcctcatgcccctggcttggggttctcagatggcagtttcaagaagaaagtcagcagcactgaccccaggccccgagactggcgaggccccccaaacagcccggacttgaagctcagtgacagtgacattcctgggagctctgaggaatcgccgcaggtggtacgtggatatccatttgctcggtacagtctgagtcgtcataaggattcatgtgtgtgagcagcttctgctggggttgtccagttttagtcttattagcatcgacaagcattgtttgttttgtggtgaataacagtatctcagcccagattaatgcactggcaggtgatttcttcctgcagcctcctgggaaaagcaaagaggtccccaagaggaaggctggggaggggacaggctcagggcactcaccatggcttcatcaacaggcgaggaaccccctacagggaccaccagctttcagccggggcaggtgtggtggtgcctaccagatgccagatgtccccggctattcctttgcctttgaatcagaaggccaggtgcctactcggccctgcccaggtcagggggtcagaggccaaggccagttgcctctgatcagttctgaggcttggacttgcccctgtggccagagctggcacgcaggcctcatagccaagcccactctacctcccaggaggccccagcccctcgttttccaaacacccagatttgtacaagtcagctgaccagcagggcctgtgttcccagtcatgacccggtcctgggtccttcctgttatccacactaagggatgtattttcaataataagcaggggccgggtgcagtgcctcacacccataatcccagtgttttgggagaccgaggtgggaggatcactttttttttttttttttggagacaaggtctcactctgtcacccaggcttgagggcagtggcgtgatcacagctcacacagcctctaactcctaggctcaagcaatcctcccacctcagcctcccaagtagctgaaactacaggtgcgcgcccccacacctgactaattttttaaatgtttggtagatacagggtctcactatgttgcccaggctggtttccaactcctgggctcaagcaatcctcctgcctgggcctcccaaagtgttgggattataggcaaggccgccatacctggccttgggaggatcacttgaggccatgagtttgagaccagcctgggcaacatagcaagaccacatgtcgacaaaatatttttaaaatagctgatcctttggctgggtgcggtggctcatgcctgtaatcccagcacttcaggaggccgactcgggtgatcacttgagtccagggtttgagaccagcctggccaacatggtgaaaccctgtctctactaaaaatataaaaattagctggacgtggtggtggatacctgtaatcccagctactcaggaggctaaggtgggagaatcgcttgaacctaggaggtggaggttgcagtgagccgagattgcaccactgcactctagcctgggcgaccaagcaagactttgtttcaaaaaagttaaaaatagctgctgggtgtggtggctcacgcctgtaatcccagcactttgggaagccaaggcaggtggatcacctgaggtcaggaattcgagaccagcctgaccaacatggtgaaaccccgcctctaccaaatatacaaaattagccaggcgtggtggcacattcgagtaatcccagctatttgggaggctgaggcaggagaatcacttgaaccaggaaggtggtggtttcagtgagctgagatcgtgccattgcactccagcctgggcaacgagcaaaactccatctcaaaaaaaaaaaaaaaaaaaattaaaaatagctgatcctggtggtgcacacctgtagtcccagctactcaggaggccgaggtgggaggatcaggccactacactctagagcaaggccctgtctcaaaaaaaaaaaaaagaagccaggcatggtggctcatgcctgtaatcccagcactttgggaggccgaggcgggcggatcacctgaggtcaggagtttgcaaccagcctggccaacatggtgaaactccgtttctactaaaaatacacaaaattagccaggcgtggaggcttgagcctataatcccaattactcgggaggttgaggcaggagaattgcttgaacccgggagctggagggtgcagtgagccaagatcgcgccactgcactccagcttgggcaacaagagcagaattccgtctcaaaaaaaaaaaaaaaaaaaaaagttaaaaaaaaagaagaagaagaagaaggcttgagtctagtcggatgggtcttgagccactctctctggtttgacggtgtcctcttcccaggtggaggcgccaggcacggaatccgatccccgtctgcccaccgtcctggagtcggaggtaggcgcccgcgggtctccatctccccagggccttgtgcacgcgcgtgtggcctcagcccgataactagcatcaatctccctctcctctccgcagcttgtccagcggatccagacactgtcccagctgctcctgaaccttcaggtacaggggcggggtggggccggccacgcgtgccctttcctggttggctggggcgcaggtgcggctctcactcgcctggccctggccctccgcaggcggtaatcgcccaccaggacagctatgtggagacgcagcgggctgccatccaggagcgggagaagcagttccggctgcagtcgacgcgtgggaacctgctgctggagcaggagcggcaacgcaacttcgagaagcagcgggaggagcgcgcggccctggagaagctgcagagccagctgcggcacgagcagcagcgctgggagcgcgagcgccagtggcagcaccaggagctggagcgtgcgggcgcgcggctgcaggagcgcgagggcgaggcgcggcagctacgcgagcggctggagcaggagcgggccgagctggagcgccagcgccaggcctaccagcacgacctggagcggctgcgcgaggcccagcgtgccgtggagcgcgagcgggagcgcctggagctgctgcgccgcctcaagaagcagaacaccgcgccaggcgcgctgccgcccgacacactggccgaggtgagcgcgcagcagccagtgtgcgcaggttgggggtgaccggtttgcacgtgcatttgcacgagtgcatgcaggtgacagggttcgcgggtgcatgcgtgcaggagtgtaagagcaaacggcacaagatacccttgcattaacagctcatgccgcagtacagacctttctcggagctggctaaatgcttaacagaacgctgttgctcaaaacatgccataaatgttagaaacttcttaaaaaaaaaatgcactcctgtaatcccagcactttgggtggtggaggcaggcggattgcttgagggcaggagttccaggccagcctgggtaacatggcgaaactccatctctacaaaaaaatacaaaaatgagctaggcatggtggcatgcacctgtggtccccgctacttggaatgctgaggtgggaggatcacttgagcccgggagaatgaggctgccatgagccgtgatcacgccactgcactccagcctgggcaacagagtgagacatgagccgtgatcatgccactgcactccagcctgggcaacagagtgagaccccgtctcaaaaaaaaaaaaaaaatgaagctgggtgccatggtgtgcaccctagctactcgggaggctgaggccggaggattgcttgaggctaggtatttgagaccagcctgggccacgtagtgagacctcatctctaaaaaaaaaatgcaaaaattagcagggcgtggtggcacatacctgtaatccaaactacttgggaggctgaggcagggggatcatttgagcccaagaggctcaagagctatgattgtgccactgcattctagcctgggtgacagagcaagaccgtgtctctgaaaacaaatctataaaccatgggttctgtgaacagatgtggacacggatgtgtgagatgtttgtatatgagtgtgtgacagtatgggtgccactgagtgtcaccacaagtctgcacatttagcaggggttggggacgggcaatgaccagcagctccttcaggctgcacctggctctgtccagaacaggagaggtcgagggtctcctgtgcacgaccctcgggggctctccagaggccgcacagcaggaacctcacattggatgtatctgctgttgtcccctcaggcccagcccccaagccaccctcccagcttcaacggggaagggctggagggccctcgtgtgagcatgctgccatccggcgtggggccagagtacgcagagcgccccgaggtggctcgccgggacagcgcccccaccgagaaccggctggccaagagcgatgtgcccatccagctgctcagcgccaccaaccagttccagaggcaggcggccgtgcagcagcagatccccaccaagctggcggcctccaccaagggtggcaaggacaagggcggcaagagcaggggctctcagcgctgggagagctcaggtgagccggccccaccccttcgcctgggcctggaaggtgcaactggtcaggctctagcggctcgctgggagccaggaaattcgggacacctgtgccatcctctggagaggaaaaccagaaggcacagctggcatcgtggctgaggccaccccacacagggccgtgtttggtctccaggcccaaaactgagatgatccaccctgcatcttctccacctcaaccctcaaaacagtgggatggggaccaggagccttagaaagggacacgggcaagaaggcagagatccctggccacgtgggatcagcacagccgggacagggacaggtgcaggcgcctctgctcattgtcccagttccacagagccgttccacagagtgggacacggagcccagagcagccccagtgtttccacggaggatgtccaggagctcctctgggggacacctccctgggggacaaccagggatgttctgggatgttctctgaagattaagggtgtgtcccgtggtcactagggcctgtgctatttccacaggaggctcagcctcctctccagatgccgggtgactctgcaggtccttccgcagggaggttggggccgttctccctgaatctggggcttagcatctgagcagctcaggtcacgggatccaggccgcccgtgggaagtgtcaggtgggggtggccaggcccctctgctctcggaggctgccctggcgggtggggacagctggccagcctggagctggcccaaataccttctctcttccagcgtccttcgacctgaagcagcagctgctgctcaacaagctcatggggaaagatgagagcacctcacggaaccgccgctcgctgagccctatcctgcccggcagacacagtcctgcgcccccaccaggtgagcccccaccccctgacatgagcccagtcccagggcagcggggctgcggcaccacccggcgactgctcagtctgaaccctctctctgttccagaccctggcttccccgccccgagcccaccgccagctgacagcccctccgagggcttctctctcaaggccgggggcacagccctcctgcccgggcccccagctccctcgccactgccggccacaccactcagcgccaaggaggacgccagcaaagaagacgtcatcttcttctaaaagggccgtgactcaaggtgcaaggcccctccctgccctgcccacccttcctgctctctggggacccccatggggtcaccatgcccacccagctgtcccctcctcttccctagcaaaccactgatgaccgcctggcaggggccagcctgtcggtgctctgggccttgcagctgtttctgtagggttagcggtggtgccggggtcactttctgaatctctttttttttttttcaaaaaggaaagtttttaatggaaagttgagccagaactaaaccagggagctgtctgaaatcatagcaccccatccgggtggcggggagatcaactccgagctgtttttccgaggcagtgaggaacggtgccggctctgcacggagctgaggacaggacagaccttgctttgagaaggagctgccggccggggccacgctccacagccgccgcgcgacagtggagccaagggttagggcaccaggaggggccaggtggcgtcggcagcatctgtccccagaatcaggcagaatccacttcccaaacagagccccacgcaggttcaccatgaacctcagggtcagggaatgagccaggcacgggggcatgggcagagagggccacggggcagggcccactgagggaacatcagtggccctccagtcaggttctgtgggtttggaagcccatcgtgaaaggggctgacctttgcccctttttacttggcattggttttgaaaccagctgtttcccaaactctgcttcccaagggcaaccgttgctgttcacacgctcagcctgtctgggggagcgggcctctagcttcagccagggcgggtacacaccctgggcacagggtcctcagcccccgggaaatgagctcccagggctggcgtcccaccttccaggtgggggctggcacatcacagactgtcgagagcgccatgtcccagggcatgcagaggatgcacctagagacgttgcagcaagtggacaagtggccgctgtgcgggcccctcgcttgtagtgagctgttgcagcttacggtccgttccctggaggggtggaggaaggaggtgttgggcagcatcaaaggtgctgggacatcccagggtggtgagatccatccacgatccagctccggtggagaaagggcccatgtcaagccttgttctgcaccccaagcattggtggtaggactgggtcctggctgatcgtccttgttcccagtggggtacatgtgagcccctgccagggccaagtccttctcccgaacccagggtcctgggaactgcagatcccggggggattcagcccttctcccactgtgctggcagaggcactcctgtgacgctgaatacagtgaacagggacattcccgccactcggggacagatgggcacaagggaggggaaactccatcaggaagtgctcccctgggcagaggcgcccactgggtgctgtgggctcaggagggggcggggcaggagctggtgccaaccgggaaccagagccccacagccatacagcccattggtgacaaggtcctgagaacacagtggccaggtgtccccaggctcctggcccctccgacgacctcaactctgcccagcccggtccctggccatcagcgacgctgtccgccccccgtcagatcccatgtgtgccatgtttatcatcagtgttttgtatttttgtactgagtatcggagcactttacagaagctgactgtacattcctgttctgttgtgaagagaacattcccagaccctggcaccctcctgagccggcgtgtgccggtccagccctccgagatgccacaattccttggatgggggagaagttcaaggaatttctgctcggccacgcggtgggaaccccgcgtccccgccatgtggcagaggggtctcagtcgtgctaggcatcgggcggcagcgccgacagcccttccctcgccagtgcccctcggccactcctgggttggagcccgattttatttgtaaagttgacagtcgagcaaatgttcctattttcgtgggatctgcacacgtctttgtcagttgtggtcatgatcttagtcacctgctaattatttttacaatgattacaacatttcctcactgcgggatatttctgacccgctttagaacttaagacctgattctagcaataaacgtgtccgagatgagcggtgactggcgtgcacgttcttggaggttttatttgaggattttcttctgcccaaacgttgctgcaggagtagcaggttctgttgggggctccccatggctcctgcccctcagctcgctcacctgccctccgtgtcctgcttaacgctctgaagaccccttcaggtccagtccccaggagttgttgggggttttgtttttgtttttgtttctgtttttttggtttgtttgtttttttgagacagagtcttgctctgtcgcccaggctggagaccagtggcaggttctcagctcactgcaacctctgcctcccgggttcaagcacttctcctgcctcagcctcctgagtagctgggattacaggtgtgcaccaccacgcccagctaatttttgtatttttttagtagacatggggtttcgccatgttggcgaggctggtctcgaactcctgacctcaagtgatctgcccgcctcagcctcccaaagtgctgggattacgggcacagggcaggagtggggcgtggaggtgcctgtggagggtcctgcccaccgggtacacttcaggctttggtggcgcctccacgaaaatctttttgcttttaatccacaataaccgcaaaggctggaactttcacttcctccatctggggtgagaggcagcttggccatgagtatgaaatcatcatttccacctggtctgagtcccggtccagtgaggcgaggaccctgctgtttcaacagagggtttcccatcacaaggggactaggtgtaaagtcgatcactagctcactaggaagcgcaaaaagggaactctcaggcagcactgtccaccaggaagatgatgcaggccacgtgtggaatttttcatttttagtagccatattaaaaaagtaaaaggagggccgggcacagtggctcatccctgtaatcccagcattttggggaggcgggggctgaggcaggaggatagcttgagcccaggagttcaagaccagcctgggcaacatagtgaaaccccttcacagaaaaattaaaaaattagccaggttggccgggcgcagtggctcacgcgtgtaatcccagcactttgggaagccaaggtgggcagattacgaggtcaggagatcgagaccatcctggctaacaaggtgaaaccccgtctcaactaaaaatacagaaattagccgggcgtggtggcgggcgcctgtagtcccagctactcgggaggctgaagcaggagaatggcgtgaacccaggaggcggagcttgcggtgagccgagattgcgccactgcactcagcctaggcaatagagcgagactccgtctcaaaaaaaaaaaaaaaaaaaaaaaaattagccaggtatggtggcgtgcacctgtaatcccagctacacaggaggccaaggcaggaggattgcttgagcctaggggttcaaagttgcagtgagctatgatcgtgccactgcactccagcctaggcaacatggtgagaccctgtctataagagcttaaaaaaaaaaaaggaaatttgggggatagaaaaaagaaatgaaatttaaaaaaaaaagaaaaaagggctggacgcagtggctcacgcctgtaatcccagcactttgggaggccgaggcaggcagatcacctgaggtccggagtttgagaccagcctggccaacatgttgaaaccccatctctactaaaaacacaaaaatcagccgggcgtggtggcaaacacctgtaattccagctactctgggggctgaggcaagagaagcggttgaacccggaggcggaggttgcagtgagccgagactgcacgattgcactccagcctgggggacaacagtgagacttcgtctcaaaaaaaaaagaaaaaaaggatgtaattaatttattacatttttatttatttttttgacatggagtcttgctctgtcacccaggctggagtgcagtggcacgctatcttgactcactgcaaccgccgcctcccaggttcaagtaattatcctgcctcagcctcccgagtagctgggattacaggcacccaccatcatgcccggctaatttttgcatttttgtagagatggggtttcaccatgttgaccaggctggtcttgaactcctaatctcaggtgatctgcctgtctcggcctcccaaagtgctgggattacaggcgtgagccaccgcgcctggtctattttttcttcattgtggtcaaatgcacacaacataaaactggccagttgctattctcctgatggtgggcattggagtgtgtgtgtgtgtgtgtgtgtgtgtgtgtctccccccaccctctgatttgctccaccccaaccccagccgtcctctgacctctgcctagctgacccctccactgggatgcccccagccttcctcagcactccttatgggccctggggggcttggaggcaccctaaaatgagatgttctgcaaagagggcctgtagtggctgggcacggtggcccacgcctataatcccagcactttgggaggccgaagtgggtgaatcacttgagcacaggagttcaagaccagcctgggcaacgtggtgaaaccccgtttctactaaaaatacaaaattagccaggcatgcttgggcgtgcctgtagtcccagctactcgggaggctgaggcagagaattgcttgaacccaggaggcggaggttgcagtgagccgagatcgcgccaccgcactccagcctaggcgacagagtgactctgtctcaaaaaagagggcccgtagtctttaaggttcacaaaggggtctgttcccagcccctaaaaggttgaaaaccactggaccagaatgggcaacccagggacagagtagtggtcaccaagcctgggggctgcgggtgggtaacagctgaggggtgtgaggtttctctctggggtgatggaatgttctaaggttgactgtggctctgcttgcacgactgtgaatgtactaaaagccactgaactgtcccccttctgtggataaattttatatgtgaattatatttccataaaactgtttaaacacacacacacacacacaaccacacacacacacaaccactggaccagctgagagagtgggagagcggcctccctttctggaagcatccaacctgtctgctctgtgcctgggctccacatggtcagtgtccaaggccttcccagcccaggctgtatccctgaaggtggcttgcttttcctcctggcacctgtgaccaggtggtcatgtggcttccccacacagaggcgctgctccaagggccccactggtatgagctagtaagtagttgggtctccaggtagacaatgagatgccctaatcatgcaggtgctgctaggggctgggaaggaggcctctgctgagggccaggacaggcctgcacccccgacaagggaaagaagggggaaacccaccaagcctggcccactcgtgagtcctgggcagaaggagcccccacagatggggtctcccgcacccgtgtgaccctgagcagtccccggcctcccagctgctcagagccacctggtatcttccttgtaaaaaacaaaccacaaatgtactctgggaggccgaggcaggcagctcacttgaagccaggagttcaagaccagcctgggcaatgtggtgagaccctgtctctacaaaaagtttaaaaattagctggatttggtgataaacacctgtagttcctgctattcaggaggctgaggtaggaggatcccttgagcccaggagtttgaggctgcagtgaggctatgatcgcaccactgcactccagcctgggtgacagagatcctgggtcaaaaagataaaaatcaaggcagtgcaattgatatcacatgaggcccaagggcgcacacacactggctgttgtgtgttcctgggccaggctgtgcaacaatgtctgccagaggccacatgtgcacagactctgaagggttgttctcagccagcagactaagcagtgccctcatcccatcccaccacacattggctgaggtgggagccccaagtatcttcagcgatgccagtgtgtgttgcccagtctcagcctggagcccttaaaatgctcacagtggccctgcgtcggcagcacagtggcatgaggccacgccctcgggtggcctgatgagaggtggcgcctctggcctgtgtgcccaggactctggggagtagagaacagccctcaatggctggaggccacttggggtccgtgggcaacgcttgctcaaagatggagaggacccaccgggctgagggcattcctgaaggtgggctggggtagtgtggtttccaactttgggtccgtcctgtggagggtaaggggccaggagccagcagtgtaataaccttcacccctgagccaggcgccagcaccacaatgtttaattgattcccgttccagctttctcaaggcacgacaggccccctcttcctcatcttgatttggatacaagacgccagctggcaggcaggaggtgctgctgaagccctgcacggcccctgaaaactgtcacggctcaggagctccaggctgaggcctgggggacctcgcatcagtccctccacccaccctgcccatgggtttcaccacaggcagctccatgagagccccggcccctgccctggcggcttctgctttgcgggaagggccctccgtgggctctggctgtgtccctgtgctcttccggcagtgtcagggggtagtggcctcggcctggccgccggcccgggccgcctggtacatgctgaggattgaggagatggtgcccatgaggcccactagccacggcgggaagcggccggcccacagcacgccccggggcagccagtgcacggcgttggccaggtcggccaggttgctgagaagtgacagcgcctccgactgcatctgcgcctccatggccctccgcttgccccggggcagcgggctgtggggcagagaggggccgcttacactcacgctcacacctgcctgcccttcccaagcccctgaatgccctgtgtggcctggcagccctgagcccctgcctgtgagtgggaggagctggcaggactgaggtggcctccctgaccatccacagagactgagtccccatcacccccccgacccaagcacgaacagggcaggaacccgggtccaagtcctcaaatccacacctcactcctcgtcctgaacacccagagatggggattccttgtgaaaaacagaaagcacaaatgcactttgggaggtgtggagggaagggggaacccccaggagcgtggcctgtgcctgcccggcctttctttatcaggatgacacagtgacgataagcctggccaatatggcgagaccccatctccaccaaaaaataaaaaacaaaattagccaggcgtgctggcccgtgcctgtagtcccagctactcgggaagctgaaacaggaggatcagttgagcccaggaggcagaggctgcagtgagccaagatggcaccactgtgctccagcctgggcaacagagcaagaccctgtctcaaaaaacaaaaagaaaaagcaacagtaacaatggccatggccttcgggaaattgatcattctctcctgctgggggcgcagccatgaaggctcagccctggagtccccgctcaagcaagcctcagtttctccatctgtaaaaggtaccgccacccaccagaggctgtgatgactcccccatgacctgagcacaacagtccccagcatgggcctgcacaggggtggctgcgagccgggatcccacgcctgctggagggagtgggcctccctgctgggtgatcacgggctcctacctggtgaagggcgccgtggggctccgcagcctctgtctcagtttcagcagcatccacagggacctgcagcaccagagcccgagggaggatgccccggcggggagcaggagggttagctccacaacgctggccccggacatacagtctgggacaggtgctgcatctcggataaacggcctgccctctccctgcccccacagtcccacaccctcctggctgtgcctcatgctcccggggactcatctctaacacggccccgtcccacccgggacatcgtcctgcacttctgacgtggccatccagggcctggcccagcctctgcaaaccactggcaagtgctcaaaggaacatcaagccccgtgaggtgttcacagcctggcagggagtcctacacagaaaaggatgccaagaggcccgcagttggacaggcgtggggacgccgtttcccctccgggcctcagctgccttgtctgctctgtgtggaaaggtccaaatcagtgccatgccagcaccccctgcacacacaccccggacattggctggacctgtctggatgatcccctgggcccccagggctggcatctgcaggctgaggaaggggctacccagtgggcagcctctgtgctcccagcaggctctgcagccgtgcatggcacccacccgggccagtccaccaggcacctgcactctccagcctcggccgtggggtgtgccgggttgtgactgtgacagaatgggcagggcctggtcacaactcctctggccactgggtacccagggtgcaggatgcaggatagcgccagtggcacagcaggtgggagcctcctggggggctagggaaaaacactgattcctgggctccccagacccacagaatcagaagctctgggccaagcgcgatggctcacacctgtaatcccgggactttgggaggccaaggccggtggatcacctgaggtcaggagttcaagactagcctggccaacatggtgaacccctgtctctactaaaaatacaaaaattagctgggggtggtggtgggcgcctgtaatcccaggtactcgggaggctgaggcaggagaatcacttgaccccgggaggtggaggttgcagtaagccaagatcgcaccactgcactccagcctgggcgacagaggaagactgtgtctcaagaaaagaatcagaagccctgggcgccggacccaggcatctccatttagcaacctcctggctgatgctccggcagccctgggccttagggcagatgtctggtcatgatgagcacacatggaatgctctccacccactccccctgctcactgcaaatccagagaaatgatgaaaaaccacatgcccgaaacaagaatgccgcagcaggcggggcacacaggacttcgatggccgtgaaacaattccatttgattctgcaaggggggacacgtgtcagtgtccaaacccataggatgcccaaaacctagcgtgaaccctaacgtgagctactcacttggggtgatgatggatccatggaggggcatcagttgtaacaaatgcaccatgtggatgctgccagtagtcggggaggctgtgtgtgggggtatatgggagctctctgaacgttatgctcaattttgccatgagcctaaaactgctctaaaaaaataaagtctgggccgggagtggtggctcacgcctataattccagcacttagggaggccaaggcaagtggatcacctgagcccaggagttggagaccagtctgggcaacatggcaaaaccgtgtctctacagaaaaaaaattacaaaaattagccagatatggtggcacagcctgtggtcccagccactcagaaggctgaggtgggagtattgtttgagcccaaggggcggaggttgcagtgggtcaagattgagccactgcttttcagcctgtctcaaaaaaaaaaaaaaagtttatttaagcaaaaaagaaaggaaccaaggctgcccctaaaatacaaaccagaggtcacgaggcacccagaggaaggtggcggaagagaggctgtgagccaaggcccccctctgaccggagccccaggaacatccaggctgggcccaggcaccctcccccaggtctcccagcacacagggaaggccagcagcacagacaccgctgcctccaggggccatggccatgaaacatgacccttttgagacagccaaaatgcacaggcagggtattaggtcaaaggctggaaaagaaccacccaagcttgaacagtgggagtctgggttggattgtgggtaattcgaatcttctactctgaggtttatctattttccagattgtctacggtaagcatgtaattaggacatctgtgccggggggaaaacaagaactactgagagtcagagcctcgaccagggacaagcaaagcttcccccagaaaaaggacacagcctgcctgaggctgggggcagccgcacctcaccccagcgatctaagagcccttcacagccactgaaacatggagaccagggggcccagctcctgctggtgttttcaggggcaggggattctgactcagcgcatttgcaaagaggaaaatgtttgggaggaaaccattactagaaagttctagaaactatatggttttttggaggcacagaactagtcaggaaactgctgactgttttctctggggtgtcggctgacagcaacgccagcaagactcagggacccgggtaaaggccactccgctggctgcttctcacaggccctggagttacttcttctttctaagtgtggtcagcagagtcatgaccccttctaaaatgtccatgtcctgaacctgtcaacatgttcacctccaaggcaaaggatattttgccgatgggattaagctaaggattttttctttttttgacacggaatcttgctctgtcgccaggctggagtgcaggggtgtgatctcggctcactgcaacctccacctccccaaattcaagcaatcctcctgcctcagcctcccaagtagctgggattacaagtgtgcaccaccaagcccagctaattttttgtatttttagtagagacagggtttcaccatgttggccaggctggtctagaactcctgggctcaagtgatccacccgccttggcctcccaaagtgctgggattacaggcatgagccaccacgcccaacctaagctaaggatcttgagatggggtattaccctggatcatccaggtggtccccatgtcatcataggggtccttataggagggaggaaggaggatgagggtcagggaaggaggtgtgacgctgaaagcagaggtcatgcttggaagatgaaggaaggggccatgagccaaggaatgtgggtggcctccagaagctggaaaatccaaggaaacggacctccccctgggacctccagaaggcatcagcgcctgctgacactagcccagggagtgttctgacttccagccttcagaatcctaagataagaagtttctgttgcccagcactacagagttgtgctaatttgttccgacagttattctaaacaaatacacccacaaaaggaagaaacaacaaaacctccaaggaaaactctaagaggcaaagacccaccgcagtctgaagcctgtgctgttgctggggccgctgccactttgctaaggaggcaccgcccagggaccttgggtgctcccttctggcccatgccacttacctggcaacccccaggagcagagagagggcccacagggttgtactcagcgtccaccaccgagaagagtccacgtggaggacccgggcatcagccgcccaggccacgtgctcacaggggtagtagagctggtcagccaggttccctaggacggagacacagcggacaaaggcgtcctcctcctgcaggaccaggagcagagggggcctagggtcagacttacccactgcccattttagcaccgtagccatgccaggtggcagagagctatttcctgaccccagtccctgggccgtgtccaggcctggcaggccccgcgggagaaaggctctggggctggggtccccgcacaggcctgatttctgtgtctcggcagcacggtgctcagtgccccttggagggaggctctcaacgcagctgtgcagtgcagtcctctgcagagcttcaaaaaccccatgcccaatgccagccgtgaggattctgcctcactcagcctggggcaggccccagtaccgggaattttcacagggaattttcacattcccaggggattcccaggccaagttgggagccctgtgtcagagccttccttcccaaaggcttccagttcctgcacaggtggggacctctgttgccagactctatgcagggagcatgaggtggcccgcagcgaaccctgaccaggctgagatggtgtgccaacccttgggccaccgcacgcccactgctgaccacgcgccaggcacagtgcggcaaggctcatggcctccctcaactccgagcaagttacagacggccacgctgaggctctcagggaaagccgctggcccccagttccggcagggatgggcctccaggccctcgaattgcaatgcacacgcgggctctcggtcctgcacagtgcccataccctctgccccaagttcttaatcacacggcctagagccagcgaggcaggaccagttgaggctgtagaaaccagcgctgaagcctggtttctgggactggagccccgcagccaaccgggggacccgcccccttgggaccccaccccccttgggaccccgcccaccgtgaccccgccccatcggagccccgccccctctacctttatcctccttgttacctgccacacccttcccctcctctctgacttcccaggaagctcctccccgcccccaccgctgattccagatgctgctctccttctttctggccagtcatgatcctacctccctccgggctctgaacctcactccagcttccctcatctgcctggcgcgtcctggcacattgcccacctccctgaggatggcggaccccgccccaatgtgctcattccgcccggatttcctgagaagcggcagggtccaggctagactctggggaggggcagaggctcaccagggcagggaggaacgcagacatataaaccgggaacccaacaaacagggctcttgttctggccaagggacactcgaggtgcaagggcctccaccccttgcctgagggctcttccacagagggcatagaggaacgaggggtctcagggatgcaccagagcgctgtcctaatcagacacggaggaggaggatgctataggtgtcaaaacaggaaggcggcccacagcaacacttatgatataggatgatcaggccaaggacacgtggtgctgaacacggtggggttgggatttcggggcggggagcacctgagtagcaagtggctcagagaggtgatccctgggaggacagagagaacagacagggcagcccagggaggggcaggacgctgagaggctggcccacgcagcctctgagatcatcccgtggggggcaagatggctctctagataggctggcacgcctgtgggacgccgcagggacaaggctactctctgcagcactgtcgcaatagcaaaaccttagaaatcattgccctgtgcgtcaaccagaggccaattaaataaatccgaagctgcatagcagagcactatgtggtcctgagaacgcagctctttctagaccgataagaaatgatctgtggccaggcgcggtggctcacgcctgtcatcctagcactttgggaggcggggcaggtggatcacttgagcccaggagttcaaggccagcctgggtaacatggcaaaaccctgtctctacaaaagatacaaaaaattaaccaggtgtggtggtgcacctgcagtcccagctattccggaggctgaggtaggaggatcacctgagcccgggaagtcaaggctgcagcgagccatgatcacgccactgtactccaggctgagtgacagagtgagaccctgtctccaaaaaaaaagaaagataaagaaatgatgccgaagctgtaccgttaagtgaaaaaagcactgtttatgtaaaccatatgtatttgcctatgcgagtacaggaaatctcacaaaggagacacaagaagctgaccacagggccgggcacggtggcgcacacctgtaatcccagcagtttgggaggctgaggcaggtggatcacttgaggtcaagagttcgagactagcctggccaacatgacaaaaccccgtctctactaaaaatacaaaaattagccaggcatggtggggggtgcctgtaatcccagctacgtgaggggctgaggcagaaaaatcatttgaatcccggaggcagaggttgcagtgagccgagatcacgccactgcactccatcctgagtgacagagtgagaccttgtctcaaaaaaaaaaaaagaagctgaccacagtggctgcctctgtggggaaaaattggaggcctggaagatcaggaaggagggaggttttttaaaattatatcctcctttggaatgtgtgaacgtttgctatttttaaaaatttaaatcaaaatgagaacatctgatcctctcaaagaagaaagtgaaatttttaaaagtaataaactacccacgcagggagcactttgggacaagactataaaacgcccatggtggctcacgcctgccatcccagcactcagggaggctaaggcgggaggaccacctgagcccaggagttcaaggctgcagtgagctatggtcactccactgcactccagcctgtatgacaaagcaagaccctgtctataaaaaaaattttttttgtttgttttatttgagatggagtctcgctccattgcccaggctgccagtgcagtggcacaattctcggctcatggcaacctccacctcccaggttcaagtgattctcctgcctcagcctcccaagtagctggaactacaggcacacgccaccatgccaggctaatttttgtattatcagtagagacagggtttttttttttagacggagtctcgctctgtcgtccaggctggagtgcagtggcgcgatctcggctcactgcaagctccacctcccgggttcaggccattctcctgcctcagcctcctgagtagctgggactgcaggcgcctgcaaccacacctggctaattttttgcatttttagtagagacggggtttcactgtgttagccaggacggtctccatctcctgacctcgtgatccgctcgcctcagcctcccaaagtgctgggattacaggcatgagccactgcacccagccgagacagggttttaccatgttggcctggctggtctcgaactcctgacctcatgatccgccagccttggcctcacaaagtgctgggattacaagcatgagccactgtgaggggccaaaaaattttttaaaaaatgtccactcaggtccgcaccctactccctagagccccacaaaccctgttacctgtgcccccaggccatattgcttagtgtagacaaacatggccaggtcatcaaagagtcgcaagatggtcctgcagtggctgagttgggtggacaccaccaacagacgtgtccccacttcggacctggcgggacactgttcaaccagaactccaccaaccagctggcagcagtaccccagcactcggatctgtgggaaaccagaagcagtcagtgtggccctcctgttctgcagaactgagctgcatccccccatacctggccccgggccccgctggattgagagtgtggaagattctcttttttttttgaaagagtctcactctgtcatccagactggagtgcagtggcacgatctcggctcaccgcagcctccatctcccatgttcaagcaattcttgtgcctcagcctccccagtagctgggattacaggcgcccaccaccacaccctgctaatttttatattttttgtagagacagggtttcaccaggttggctaggctggtctcaaactcataacctcagtgatccacctgccttagcctcccaaagtgctgggattacaggcatgagccaccgtgcctgacccaagagtttggaagattctaaatctacaaagtgacagtaaaagctgaaagtttaggtggggcacagtggctcacacctgtaaccccagcactttgagaaaccgaggtgagaggatgccttcacaccaggagtttgagaccagcctgggcaacatagcaagaccctgtgtctaccaaaaaaatttttttttttgagacggagtcttgctccgtcacctaggctggagtgcggtggcgcgatctcggctcactgcaagctccacctcccgggttcatgcgattctcctgcctcagcctcccgagtagctgggactacaggcacccgccaccaagcccacctaattttttgtatttttagtagagatggggtttcaccattttagccaggatggtcttgatctcctgacctcatgatccacccgcctcggcctcccaaagtgctgggattacaggcgtaagccaccgcgcctggctaccaaaaatttttttaagttaacagggcatggtggttacttgggaggctgatgctggaggatcacttgagcccaggagttccagactgtagtgagctgtaatcgtgctactacactccagcctgggcaacagggcgagaccctgtctaaaaaaagaaaaagaaaaagaaaaaaaaagctggaagtttaaaaacatacttggaggtgggacaaatgaagaaacatgacatcattgatgtaactgaagggcacagcctttgggaacagatgtgacaggaacaaagaaaacaaagctccttacttcccacctcctaggtccttcttttcccaggtggcaggaagccacagctaaagtgtatatttacatctacctgcctggaccaaagcctttggatgtgctgaatggtgggcacaggtgatcaggcctcaacccagtgaacaacaggataatttggtagaattactttagagagaaagaacctactcagtaggtgatgtggagccttctgaaataggtcatcttcactactcagatcttttttcttttggagacagagtcttgctctgctccccaggctcgagtgcaaaggtgtgagctcactgcaacctctgcatcccaggttcaagcaattctcccgcctcagccttccaagtagctgggactacaggcacgcaccaccacatccggctaatttttgtattttagtagagacgaggtttcatcacttttcccaggctggtctcaaactcctgagctcagacaatccacccagctcagcctcccaaagtgctaggatcacaggcgcgagccaccacgcctggcctcccttatatctttattttacctgcttttcagaaattgcttgttcctgttgttttatttatttttacttgtaattcctttccagccccattataatggcaaaacactgcaatctgaatgttcaactcgggggagatttgttaacccacccccccaatcataagatatttgaatggaatctaaatgcctagccaccagtacaccgcctggtacaacctgaatgtctacctataagagactggtggggacaagctaagagtccagactcaggggcatggatggcataacctaaatgttcaaccatatgggacttgattggaactaaaaactgtccagccatagggagagtcttgcaatatcctaaatccccacatgagattgtttgggacaacccagggaccaactacagtggcccggtcagatcctaaatgtccaaacatgggaatctgtttggtatgtaaacgtccagccaggctgggttggcagagacgatctaaatgaccaactggggttttgttggaacccatcgctgcttaggcatggcagggcccaggccatggcgtgttctttggtctaggttggctgaaacaacctaaatgcccaactatagggaatctggttggaagtgaatgtccagccacaggggagccctgcaacatcccaaatcccaacacgagattgttcaggacaacttcagtggcctggtcggatccaaaacgtccaaacacgggaatctggccagtgtgtcaatgtccagacaggttgggttggcagaaactatctaaatgtccaacgctggccagacgcggtggctcacgcctgtaatcccagcactttgggaggccgaggcaggtggatcgcttgaggccaggagatcgagaccatcctggctaacacgatgaaactccgtctctactaaaaatacaaaaaaatagcagggagtggtggcgggcgcctgtagtcccagctactcgggagtgctgaggcaggagaatcgcttgaacccgggaagcggaggctgcagtgagcagagatcgcaccactgcactccagccaaaataaataaatacataaatgtccaatgctagggcaccgcatttgagcctagctcggacggggcctctgcgacggagtatcctgggcgaccccgtcccctctctggcccgtttcccagtctctgagcttgggccaaactctaggacctccggccccggtccgcccctgcctcaccaggcggtcccggcccctgtacgactccagcgccgacgccaggccgctcagcgacgccatggcaactccgtgacgtcaccgcgacgtcggcgcgccgcgccagggggcggggccaggccggggtaccgggagcgccccaaaggcttgcgcgcaggcgcggccgcaggcctttgtccccctgaccggctttttgtccgctgtaggggagggacagagtttgcagaggtggggccgacacgtgtgtgctctccaggcctgcagaccctggatcatcctcggagtttgctgcattctgccccacggcggtttggccaactacccacgcacaaaaaaatatatttctaagtttaaccaactacccacacgctccaaaaatattccaagcaaaaccaccaacctgttcgcagtggttcaaggagagattttcctttttagtttttgtgcttcaccttttctgcactgtctgcctgcccgtagtgagcaggaatgactgctgtaatatcacaacaaggcatctttcgacgttaaggaaagacgttatctttggacgttaagaattgttctagaatacataaataaaaaataaaaatgcacaattcagtgacattagtacatgcacatgttggacaaccatcaccccttgctagtttcggggtatttttatcacccccaagagagacccccgtaggagaccagcatatgcccctctgaaatatgcgaccttggtgtaggattattttgagctgagatcaatgaagctgataccggaaaagctctctgttcttccctgatttgcctcaaagcaggacctaaaggtacaaaggtgccctcctcccctctctaccaggaaggacaaaggttgatcaccagggacacctttagactcttgtctggagacgtcttttttttttttttctttttttttgagacggagtcttgctctgtccccaaagctagagtgcagtagcgccatctctgctcactgcgtcctccgcttccctggttcaagcgattctcgtgcctcagcttcccaagtagctgggatcacagctgtgcaccactgtgcccggctaatttttgtatttttggtagagtcggggtttcaccacgttggccaggctgttctcaaattcctggcctcaagtgatccgcccgcctcggcctcccaaagtgctgggattacaagcgtgagccaccgcacccggcctcaatgtccttttccttcgtcttgtcacttctccaaaaatttgctgctatatgttgaaggtgctatataagcaggagttatataagctatataagccacctcatttctcttggcatctcccatgtacacataaggtacacatgttaataaatttgtttttcccttgttaattttttttttttagacggagcctcgctctgtcgcccaggctggagtgcagtggcacgatctcggctcactgcaagctccgcctcgcgggttcacgccattcttctgcctcagcctcccgagtagctggcactactacaggcgcccgccaccacgcctgggtaattttttttttttttttttttttgtatttttagtagagacggggtttcaccgtgttagccaggatggtcttgatctcctgacctcgtgatccgcccgtctctgcctcccaaagtgctaggattacaggcgtgagccaccgcgcctggcctctattttttttttttttttttttttttttttttgagacagggcctcgctctgggaggaaccaaatttgtagatgtgaagccgccacttgtgtgctctctgggcctgaggacccaggatgatgcccagagcttgctacattctgccccatggtagcttgaccaactacccacaaaaaaggggtagagtgcagcggcacgatcttaactcactgcagccttgaactcctgggatcaagccatcctgccacctcagcatcctgagtaggtgggaccacaggtgcctgccaccacaattggctaatttctttttattttttattttttgtagaaatggagtcttaccatgttacccaggctggccttgagccctgggcttaagcaatcttcccacgtcgaccttccaaagtgctggaattacaggcgtgaaccaccgcacccgcccttcttaattctttcattgcaaggatccatcacagctaagaactaagaataaaggaaaaagtatgtttcctcccctacaccctgttcccataaagcaatcactcaattcctccctcctcccagcccctggcaaccactaatctgcattctctgctgtctctctgtatttttaccacttcttgattttttttttttttttttttttttgagacagagtctcactctgtcacccagactggagtgcagtggcatgatctcagctcacggcagcctccgcctcccaagttcaagcaattctcctgcctcggcctcccaagtggctgagagtacaggtgcgcaccaccacacccggctaatttttgtatttgtagtagagatggattttaccatgttggccaggctggtcttgaactcttgacctcaagggatctgcctgcctcgacctcccaaagtgctgggattacaggcatgagccaccatgcccgacctccttgatatttcatacaaatggaatcatacaatatgtgaccatttgtgtcggcctcttccaccaagcataataggttgttttggtttttgctttttgtttttgagacagggtcttgctgtgtcaccaggctggagtgcggtggtgtgatcatagctcactgcagccttgaactcctgggcctgagagatcctcctgcctcagcctccacattgcctgggactacaggtgcacgccaccacatctggccaatttttaaaatttttcttttgtagagatgcggtctcgctatgttcaccaggctggtttcgacctcctggactcaagggatcctcctgccttggcctcccaaagtgctgggattacaggtgtgagccactgcgtgcagctgagcataatggtgttgaggtttgtctaagttgcagcatgtatcagaaattcattccacttgcagctatataacattgcgccatatggatggaccacattttgtttatccacgtatcagctgatggtcatttgggctgtttctgccttttagcgatcgtgaataagtacagctataaacatttgtgaatatgtagttggagtccctggattccattcctttgggtctatacctagaagtggggttgctgggtcattttgtaactctatgttgaactttttgagtaattgcccaactgtttcccacagtagcagtaccattttccatccccaccagcattacacaaaggttccaatttcgccacttccttgcaacatccttttttgattatgatagccatcgtagtaggtgtgacgtgccaccccattgtggttttgttttgccttttcctgatgactaatgatgtcaacgagtctgtttgttggtttgtttgaatttttttttttgagacagagtgtcactctattgcctaggctggagtgcagtgctgatctcagctcactgcaacctccacctcccaggttcaagcgattctcatgcctcagcctcccaaatagctgggattacagcacacccgccactgtgcccggctaattttagacttttagtagagacggggtttcgccatgttggccaggctggtctccaactcctgatctcaagaaatctgcccacctcggcctcccaaagtgctgggattataggcgtgagtcaccgcgtctggcctcgatgttaaccagttttctttcacagaatatttcctcttgatttcaactcttgttactcttctcctgcattgctttcctcctgttgtttaaagttacagcagattcctgcctcaggaactttgcatgttctgtttcctctgcagaaatgttcttgagccagataccaacgtggctccctccttccctaacttcctttactcgaatgtcatcctctcacgggacccacccgatcacaccctcctggacacttcctacccatgttacctgctggtgacctgtcttgttcatggctatatccgcacagcctggcagaaaacagagaatctgttttgtaagtttcactgccctgtccaaagatctcttcttgtgctccaagggagcatggaacacaagggggcacaagaaaggccttgtccactcctgtgattttcttcctctctgtctctctctctttctgtttttgtttttaaacagagtctcactcggttgcccaggctggagtgcagtggcatgatttcggctcactgccatctccacctcccgggttcaagcaattctcctgcctcagcctcccaaccagctgggattacaggcacctgctaccacgcccccactaatttttggagtttttaatagaaatagggtctcaccatgttggccaggctggtctcaaactcctgggctcaagtgatccacccacttcggcctcccaaactgctgggattacaggcatgggccaccatgcccagcctcttttttttttcttcttgtttgtttttgagacagggtctcgctctgttgcccaggctggagtgcagtggcatgatcatagcaccactgctgcattgaactcctgggttcaagtgatcctccatcctcagcctcccatagcactgggattacaggtgtgtgccaccacacctggccccaagagactctttaacttccacatccagctccttttaagacttgggtccactggctgagctcagtgactcacacctgtaatcccaatactttgggaggccaaggcaggtggatcacttgaggtcaggagttggagaccagcctggccaatatggtgaaaccccgtctcaaaaaaaaaaaaaagacttgggtccacgggtctttgtgcactcccctctcccccagtgggggggtcactctttttttttttttttagagtcagagtctcgctctgtcacccaggctggaatacagtggtatgatcttagctcactgcaacctctgcctctgggttcaagtgattctcctgcctcagcctcccaagtagctaggattacaggcacccaccaccacgcccagctaatttttgtatttttagtagagatggggttttgccctgttggccaggctggtctcgaactcctgaccttggggaatcctcccatctcagcctcctaaagtgctgggattacaggcatgagccactgcgcccagccacggggtcactgttttcacagcagaaaaattgaagccaagccagctgcagtggcctgtgcctgtggtcccagctactcaggagtctgaggcacgagaatcgattgaatccaggaggtggaggttgcagtgaaccgagatcacgccactgcactccagcctgggcgtcagcaagacccatctctaaaaaagtaaaacaaaaaaaaatccaaagccaaggtccagacatgcagaggaaagaggtcactggccgcaaagcctgctgctgcatgaataagcagatccctcctctcaggcccaagagccttggaacagcgcaatgcatttgcccgaatgcttcctgtgtgccgggtcccgctctaggcaacagagatacagcagtgagctttgcagacacagcccagccctcccagcgtcccccatctggctaggtctgagctcgacctttgaaaaagacacaggagctggcctggtgttcacagctggccttggtgttgctaggagctggcctggcagtcaaagcagggccctggtgtcctcctgctggacataaacaatctcacatgacgccgacatcagacaaggccactctgtgaccgcggcagagcaagacaaaacaagcctgctccataatcatgtctgaacacaggcaaaacacgaacactgtccacactatcagagtaactggacctcctctgctactagctaataccagcaacggctgttccttaccaagcacagctttagtcttctgacttctttctttctttctttccttccttccttccctccttcccctccctccctccttccttccttcttccttcctttccctccctccctgcttccttccctccttctctccctccctccttccctccttctttccttcttccttcctttccctcccttcctccctccttccttcccttcgtccttccttccttccttccagctcccagcttccctggagctctaaggaggcaggatttgcacaaaaaacaaaaccgtgcccccaaaacacctaacagaactgcagatcccaaatccctccctccctccctccctcgctccctcccttccttccttccctccctctctccttccttccttctgacttcttcatacagatgattaagatgctgaataatagttacttctctccctagctgctcttttgttttgtgttgtttctgagacagagtctcactctgtcacccaggctggagtgcagtggcggaatcatagctcactgcaccctcactgcaacctcaatgtcctgggttcaagaaatcttcccaccttagcctcccaagtagctgggactataggcacgcgccaccgcacctggctttttaattttttatagagatagggtctcactgtgttgcccaggctggtctcaaacacctgggctcaagcagtcctcccgcttcagcctctcaaagtgatgggattacaggcctgaggcactgcactcagccgcccttgcttctttttttttttttgagacagagttttgctctgtggcccaagctggagtgcagtggcacgatctcagttcactgcaacctccaccacctgggttcaagcgattctcctgcctcagcctcctgagtagctgggattacaggtgcccgccaccatgcccagctagttttttttttctttgagacagagttttgctcttgtctcccaggctggagtgcaatggcgtgatctcagctcactgcaacctccgcctcctgggttcacgcaattctcctgcctcaggctcctgagtagctgggaatacaggtgcccgccaccacacccggctattttttatatttttagtagagacagggtttcaccatgttggccaggctggcctcgaactcctgaccaaaggagatccgcctgcctcagcctcctgagtagcggggattacaggcgtgagccaccacgcccggctaatttttgtattttcagtagagacagggtttcaccgtgttcgccaggctggtctcaaactcctgacctcaagtgatccacccaccttggcctcccaaagtgctgggattacaggcgtgagccaccacaccaagccacaacagcccttttctggacgctactttgggaggctgagattacaaatgtgagccaccatgcctcacctgtgtgttgtttttatttgtttttatctgctcatctcaaaaaagaaagtaaaatttccaaccaataaattcatcccacccaaatcccctacttccttaagctgtgcccccaaaacaccgagcagaattgcaaatcccataataagtgctttctggccgggcgtggtggctcacgcctataatcccagcacttcgggagactgaagcgagcggatcacccgaggtcggcaattcgaaaccagcctgaccaacatggaaaaaccccatctctactaaaaatacaaaattagctgggtgtggtggcacatgcctataatcccagctactcgggagcctgaggcaggagaatcacttgaagccggaggttgcgatgagctgagatcgtgccactgcaccccagcctgggcaacaagagcgaaactccatctcaaataaataaataaataaataaatagcgaaaaaaagttctttctaacacctccctactgagaccgccatagtgccctatgacatgtatgagctctctctccctctctctttctttctctctctctctctgatgaataataagcttgaatgtgttcaatcacaggtacattcctggtggtctttgactggggaaggaggggtgaccggcccctttaaagggagatctgtgagccctagaataatatcaagaggtgcagtgattcagggaagtgggtccattctgtgtggggtgtgtagaaggtagagggacagaaaaactttagaggatgataataataatggacaccagcagcctatttaatcaaatcctcaatactgacactgctttctgaactggctaccatcattagtccccttttgcagatgacaaaacctaagtcctagccaggcatggtggcacacacctgtggacccacccacttgggaggctgaggcgagaggatcgcttgagcccaggacttcaagtccagcctgggcaacatagcgagagcttacctcaaaaacaaaaccaaccgaacaaaaccccagaggctccaaaaagtcaattacttgcctgggttcctggagctctaaggaggcagtattcgcaccaagcctgcctgctaattttcctcccggctgcccctagaggtgctgagtggtcattgtgacagtatcattacacaaaggaagctcttggggtcacaatgcgcagggctggaccacccttggatgcagcctgggaaggaacatgaggatcctctgagagaccagggacagagggagacccaaagatctggtctgtagctaagtgaattttctaaaactcattgattcacacgccatcccttgaggtaggtgcactgtcctcgtccctgatgtacagaggtgaaaactgaggctcatgggagcttaatgacttattccaagattacctggctagtagtctcagttgttggattctctgatgacccattttggaggtcatattcaactctcaactattgcagggggcaaatgattcaaaaagcagcaaactcagccaggcgcggtggctcatgcctgtaatcccagcattttgggaggccgaggagggtggatcacctgaggctaggagttcgagaccaggctggccaacatggcgaaaccccgtctctactaaaaatacaaaaattggccgggcgtggtggcggacacctacagtcccagctactctggaggctgaggtgggagaatcgcttgaatccaggaggaagaggttgcagtgagctgagaaaaaaaaaaaagcaacaaacttacacactgaaaaactgtggtttcattaaaacacacacacacacatacacacacacacacacacacacacacacacccttcatccatgttttctttctatttttgtgatggggtttcgctctgtcacccaggctggagtgcggtagcgtggtctcggatcactgcaacctctgccacccaggttcaagcggttctcccgcctcagccttctgagtagctgggatgacaggtgcatactaccatgcccagctaatttttgtatttttttcttttttttttttttttttttgagacagagtttcgctcttgttgcccaggctggagtgcaatggcgcaatcttggctcaccacgacttctgcctcctgggttcaagctattctcctgcctcagcctctggagtagctgggattacaggcatgcgccaccacgcctgactaattttgtatttttagtagagatggggtttctccatgttggtcaggctggtcttgaactccgacctcaggagatctgcccacctcggcctcccaaagtgctgggattataggcctgagccactgcacccgtctgatccatgttttctaaataggtagaggtaagcaggttttgtgggttgaagtgatctgggaggtcttcctgcaagaggtgagcctgagaacttggaatgctggtctccaagggagacagagaggagagcatgggagacacttgtgatctaagcaaaggcaagaaagtcccaggtgactgagcagaggcggagggtcaggggaggcttggagtctgaagctgaaggtcagaggagagagctaactctcagaaggtgtgaagacaggaagagattgagaataggcaggacctaggacaactgcagagcaggggaaaaccagtaagaaagtgcgtggcaggccgggcacagtggctcacacctgtcatcccagcactttgggaggccaaggcagacagatcacttgaggtcaggagttcgagaccagcctgaccaatgtggtgaaaccccgtctctaccaaaaatacaaaacttagacgggcatggtggcaggtacctgttatcccagctacttgggaggctgaggcaggagagtcagttgaatccaggaggtggaggttgcagtgagctgagatcgtgccactgtactccagcctgggggacagagtgagactctgtcacaaaaagaaaaggaaagaaagaaagagagagaaggtagggaagtgaaaggagcggaggggaggggggaggggcgggggagggggagagaagggagaaaaagtgtggcagaaacggagatggccagtggctggggtgcagggctggagttaggcagaggaacaaaaatgggtcccccagaggggaagaaggagaaaaccgtggccttgacaactgactgagggtgagaagacgcggttcttgtatcagacatacagtagaatgcagtggttaattctccaagttctagaatcagagtcgccctgggttcaaatctcaagcaaatgaccacctccctgagcctcaatgtcttttgtgaagcagtggttaaaacctacccttggccaggcatggtggctaacacctgtaatcccagcactttgggaggctgaggcagaagggttgcttgagcccaggagtttgagaccagcctgagcaacatagccagacccctgtctctaaaaaaaaaaatagaaagaattagccatgcatggtggtgcacacctatagtcccagatgctcagaagactgaggtgagaggaccgtttgagcccaagaggttgagcccaccacacttgtctaatttgtgtgtgtgtgtgtgtgtgtgtgtgtgtgtgtggagacggggtcccactatattgcccaggctggtcctgaactcccgggctcaagcagtcctcttgctctgacctctcactgtgcctggatacaggtgtgagtcacagtacccagctattaccttctaacctactcttcaatttttgttgttatattttttattattgtctgtcatctcccgccccattatcaattccacaaaggcagggatctaggtctattttgtgaactaatgttagttccccacccctgctggcctccaggcctagagtagggacagaaatcatttatgtggtgcctactgtgtgccaggcctacagtaggcaccacatgaaagatttttttttatgttttgagacggagtctcgctctgtcgtccaggctggagtgcaatggcacaatctcggctcactgcaacctctgcctcccgggttcaagcgattctcctgcctcagcctcccgagtagctgggactacgggcgcccaccaccactccaggctaattttttttaaaaattatttttagtacagacagggtttcaccacgttggccaggctggtctcgaactcctgacctcaggtgatccaccggcctcggcctcccaaagtgctgagattacaggcgtgagcccccgcgcccagccatgattatttctgtctctgctctcgctgggggaaggcacagaagctgtaccagtttcccgtgatgtccccagcctccagctcagtgcttggcgaacagaaaggagtcaaaggcagcagaaaggagtcaaaagcaggagtcaaaggcaagtgccccaatgggcacttgctcagtccctcatctccaccctctcgcaggtggctggtgtcccgcgatggccacaggcgccctcctgccgtgctcgcgcccgtgcccgatgtcccggctggacttcctcaaggcctcgcacttctcgctggggcctgacctgcggctgcacgagggcaccatgcgcaccacgtcgcaccgggactttgcctacccggctgccacccgggagccgccgagcctgcagccgccgcccgcgctgcttttcccaatggacccgcgctgggaccgggaagagcgcgtgtcggaggcgcaccgcgcgttcccgccgccatccacgccgccgtgggagctgctgcaagcgcaggcgcgggaacgcacgctcgccatgcaggccggcaacctgcacctgcacgaggacgcgcacgccgggatcggcctctccaacgcgcacgccgcctacggctggcccgagctgccggcgcgcacccgagagcggatccgcggcgcgcgcctcatcttcgaccgcgactccctgcctcctggcgaccgcgacaagttgcgcatcccgcccaccacgcaccaggcgctctttccaccccacgacgcgcgcccgcagcctcgcgcgcccagttgccacctcggtgagcgcgcgcccgggctgagtgggcgatttgcttcacattgtggttctcaaacaggggcaagggctcttcattccccttcccccagggaacatttggcaatgtctggaaacgcttttggtggtcaggacttggggggtggccgggcgcggtggctcaagcctgtaacctcagcactttgggagttggaggcggggggatcgcttgaggtcaagagttcgagaccagcctggccaatatggaggaaccccgcctctactaaaatacaaaaattagtagggcgcggtgaagggtgcctgtaatcccagctacttgagaggctgaggcaggagaatcgcttgaacccagggggcagaggttgtggtgagctgagattgtgccaccgcattccaacctgggagacagagcaaggctccgtctcaaaaaaaggaaagaaagaaaggaagaagagaaagaagaaagagagagagagagagaggaaggaaggaagaaggaaggaaggaaaacaagacagagaggaagggagggagggagggaggaagacttggggggtggcgaggccacccgcggtggctcacgcctgtaatcccagtgctttgggaggcctaggcaggaggatgtcttgaggccagaattggagaccagcctgggcaacatagcgagacccatctctacaaaataaaaattttattatttttttattatatatatatgtgtatatatttttttgagaaagtgtctctgtcacccaggctggagtgcagtggcatgatctcggctcacacagactaaatctgcccagctcaagtgatcctcccacctcagcctcccaggcagctgggactgcagacacgcatgtcaccaggcccagctaattttttgtacttatttgtagagatgcagtcttactatgttgccctggcaggtcttgaactcctgggctcaagcaatccatctgcctcgacctcccaaagtgctgggattataggcatgagccactgagcccagcccttacaaaataaaaatttaaaaagatgggcagaggtgctaccagcagacagcgggtagaggccagagatgctgccaagtatcctcccagccagccccaaatgtcaattacaccaagcctcagaaaccctggaaccaccttgagcatcagtttcagcatcaggagggtggacatatcctctgaatctgtccagagtggtgcatggttggcagaagtcatgaatgccagtttggggtcagacaaatcagctaagttccccagctgtacaccctcctccccacaccccccagccttaccaccttagtagctgtgtgagtctgagggagttaacctctccaagcctcagtttccccgtctacaaaatgggtgcaatcacagggcccaattcacaggagctagtaaagctgaatgtgtatggtgtgtctggtgcagagagcacttaacaaagagtagccagcattcgtgtaattttccaattctgtgactccagggaccctttgggtgaacattactggtcagaggcccctaagatgggctcagggattgtcaaaccctgatttgacatttagttgtgattcctagtttctgtgatttctggcaagttgcttaacctctctgagcctcaaggaggctgtaacaagagaaatgataccaggtccaagaagaagttgcggccgggtgcaatggctcatgcctgtgatcccagcactttgggaggctgaggcaggcggatcacttgcggccaggagttggagaccagcctggccaatgtggtgaaaccacatctctactaaaaatacaaaattcagcctgacctggtggtgcgttcctgtaatcccagctagctacttgggaggctgaggcaggagaatcgcttgaacctgggaggagcaggttgcagtgagtcaagattgtgccactgcactccagcatgggccacagagcgagactccatctccaaaataaaagagagacggagagagagatactcagtcctggaaaaagatgcaatgcacttaacctatgtgtggctcaatatagtccttggtagatattattggggtttttttgttttattgtgtgtgtgtgtttttgagacagaatctcactctgtggcccaggctggagtgcagtggcacgatctcggctcactgcaacctccacctcccaagttcaaattattctcctgtctcagtctcctgagtagctgggactacaggcacatgccaacacacccggctaatttttatatttttggtagggatggggtttcaccgtattgatcaggctggtcttgaactcctgacctcaggtgatccacctgccttggcctctcaaagtgctgggattacaggcatgagccaccacacctggctgtatttttaaatttatcattattttttagagatgagggtcttactatgttgcccaagctggtctccagctcaagatgggctcaagcccatctttgcacttcagccacctgaatagctgggattacaggcatgggccattgcacctggcttttagtataatttattttatttttatttttatcttttggtgtttgccagacagctctcagtctacactgttcagaatggcccagctccccttcccaggcaagaaatagaattccttccagagggcttgagatggcagggaatctcaatctctctctctctccccccatcccccttgcctatcctaagggggccccaacaccctcaagtgggactacacgagacaagatgggacttcctaccaaagacagttccaggccctgccaggcccacctgccttgaggtgtaagagggtaaattgaggctgtgttggggctgcaggcgggggcagaattgggggctgggtggtttgggccttcctatccctgtctgcccacaggcctcctccggagtggagctgggagactgcaagatcagctatggatcaacgtgttcggagcagaaacaggcctacaggccccaggatctgcctgaagataggtataaaggggccactgcgggcacggtggctcatgcctgtaatcccagcactttgggaggctgaggcagacagatcatgaggtcaggagctcgagaccagcctggccaatatggtgaaaccctgtctctactaaaaatacaacaattagccgggtgtggtggtgggcgcctgtaatcccagttactccggaggctgaggcaggagaatcgcctgaacccgggaggcggaggctgcagtgagccaagattgcaccactgcactccagcctgttcgacagagcaagactccatctcaaaaaaaaaaaaaaagtgggggacgagggggcactgccttcccacccagatgggacaactggctttcagtagcatgtggtatttgccccttagggctttagggcccatactctgcctctgaggtctctgtcactggtagccaaggtgcactattgtgccagatctctcattatcagagccccacagcttggtcattaggaaaccctgctcccctccctctttctgggggttgcaaggccccagatggatccactttagcttcttcttcttctttttttttttctttttttttttttgagacgtagtctcgctctgttgcccaggcttgagtgcagtggcacaatctcagctcactgcaacctccgcctcccgggttcaagcaattctcctgcctcagcctaccgagtagctggaattacaggcatgtgccaccatgcccggctaattttgtatttttagtagagatggggtttcaccatttttgccaatctgttctcaaaagcctgacctcaggtgatccacccacctcagcctcccaaagtgctgagattacaggggtgggccaccatgcccagcccactttaccttattcttgatggaataatacactacgtacaggtatgacaaggcccaggccacagcccacatccactgtgtaaatatccgtcctggtgacggcctcttccgcgacaggaccaccaaggccgagcacttctatgccagggagccaggtgagagcctgaggcccgccccgtcccgcctcccaccgcagcctcccagggcagctctgcacctgttccgcttctggcagagccttttgttcttcaccacgatcagactccggagtcgcacatcctgaaaggaaattggtgccccggccccggcagtctggacaccttcatgcagtacttctacggccaggtgagcaggaagagcgaaaaggcggcagggaaaagggcttcccagacagagcaaatagcaggtgcagaagtcccaaagtgggagtgagcttgatatgtatgcaggaatctcctggatgtacttgagtgatctagggcgagtcacttaaccactccgatcctcctccgtggctccttctgtaaaatgagataagagtaccaactcccagtgctaccaggtggggcccagaaggggtgagggagctgtccaaggtcacacagagcccacctcctccctcccccccgggcccggggacctctcggacgccggagctttcaaatgccatgtggtcctacagccgccacccccgacccagccacccagccgccacgtgcctcatgagaaattgcagagtcatgtgaccctaggggagccaaagctactcaaacgcttcttcaagaccaccatgggctcggactactgcccttcagagtggagacaggtgcagaaagcgcccaacctccacttgcagcaaagctacctgccgcggggcacgggcggtgagcgctcccgggaagccccgccccatggagccccgccccgggaagccccacccccgaaagccccgcccccatggagcccctccccatggagccccgcccccacggagccccgtcccgggaagcccagccctggaagcctcgcccttgccactgctctggccccgcccctaaccagccctcccctcccccggcttcatcccctgaaaggctaaatcccacccccaattgaccagaaccccaactctgctcctggataatcccgccccttcatggccatgcctctccccttcataactccatccttctggacacggccctgccccttctccatcctctcttatccagtcttaactcctcttccattgtcagactctggctccgcccctgacccgctagcctgccctgcctggccctgcccacagactcatctggcccggccccgcccctgaccttcttagccctatgccctagctctgggttcctcccctagctcctccgtcctcctccagctcctccctcttcccaagctcctccccctttctctggctccttcctttgtcccagctcctccctctttcccagttcctccctcttccccagctcctctctcctcccctggctccttcctcctcccccacctcctccctcttccccagcgcctacctctttcccagctcctccctctttcccagctcctcccccttcctctggcttctccctccttctttggctcctccctcccccctctcctaatccatttttctcccctggtcaacttcagcgctggcctgggcttggctcttgaacccttcccttgaacttcaccacaccctcagccccgcctcggcccacagccctcactcagcctccccaacctgaatctccagaattcgattttttaaccatgaaccagaagatgctgaagccacacagaacacctccggccccggtgactgaagagatgctacagcgggtaagggaggcggaggggagccacccatcattaggcaacccccacattggtgtagagttatctcaggacgactatgctgtcaccctgtctcagagttagtgatcacccaggctcgggggcatcttaatatcccttcagcctgaagatcatccctagcttggccgggtgcagtggttcacgcttgtaatcccagcgctttgggaggccgaagcaggcggatcacctgaagtcaggagttcgagaccagcctggccaacatggtgaaaccccgtctctactaaaaatacaaaaattagtcaggcatggtggcgcatgcctgtaatcccagctactagggaggctgagacagaattgcttgaaccagggaggcagaggtttcagtgagccaagatcgcaccattgcactctgggctgggcaacagagcaagactctgcctcaaaaaaaggaaaaaaaaaaatagaggtcatctctagctcaccccccagggtcatgtcaaggtcagctcaggggcatctttgcaccaccaccactgttatacccaagacgagggttaattcagagccacccaggatcaccccagccctggagtccttccagggacacccctggtttctctccatcttcttatccagctcctcattcagcccagcctggggccctttttgcccacctctccccagagttcaacctccccagcctttgatgctctggctctgtccctaggcggccccaccttaccccaggcttcaccttctgaagggctaaatcccaccccaaattgaccagaaccccaactccgcccctggacaatcccgccccttcgtggccaagccccgcccctgcataactccacccttctggccatagcctcgcccctttccctatcctctcttacccagtcttaaccatcctccttggtcagacactggctccgccccgaccagctagcctgccctgcctggccccgccccctgactcatcaggcctggagatcctggggtggacagggtggatcggccacctcccaggctgccctgccaggctgtccaccctgtctccacagtgcaagtacagccacatggagccccctctgggtggactgcgcttcttctcaacacaatacaaggacgagtttcctttcaagtaccagggcccagcagccctgagactgaaaaatcctcaggagggcttcgtgcccctgggcacgcctcaccagcgcggctgcagggagaagatagaccctctggtcccccagccccctatgtacctgtgccccagccagcaataaatgccatcttggcaacattccactctttcccatcagtcagcccatccagaggatgcttgggtgggtgggggctggaggaagggactgcacgggaaaggatgactccactgttgctgcgttgccatgaagagtatggagtcaaggctgggcgcggtggctcacacctgtaaccccagcactttgggagactgagatgggaggattgcttgagcccaggagtttgagatcagcctgggcaacatagggagatcctgtttctacaaaaaaaaaaagataatcggccaggtgcagtggctcacacctgtaatcccagcactttgggaggccgaggcgagcggatcacctgagatcaggagttcgagaccaacctggccaacatggtgaaaccctatctctactaaaatacaaaaattagccagatgtggtggcacatgtctgtaatcctagctactcgggaggctgaagcacgggaatcacttgaacctgggaggcggaggttgcagtgagctgagatcacaccactgagctccagcctgggcagcagagtgagactaagtcttaaaaaataaataaataaataaataaaaattttagaaagccaggcatggtggtacgtgcttgtagtccaagttattcaggaggctgaggtgggaggatcacttaagcccagaaatttaatgctgcagtgagctatatgattgcaccactgcactccaatctgggcaacagagcaaaaactctgtctcaaaaaaagaataaagttatagtgctgaacagagatactggcgtgcgtacttcagaacacagatccctggggccggggaagggtgggggtgctggatgggcataatccaaactcggactcctccacgtcctgggtggtagtttgggcaagtcacttaacccctatgagcctcaatttgctcatctatgaaatggggataagtagcaattctcccatgagactgttatacatgagaaatgtacacacttttcagtgcatggggctggggtcgtggaggggaagcttcccttctgaggatgagaatggggaaggccagggtgtggggaaaaagctttcaatggtggggacactggatgtggcccatagaggacatggaagagtggacacagctgagaataacccagcagttttttccatcatggacagagactagagaccgaatggggcactggttgtctgggcaactggtccccaggtcagagcagagtccaggggcaaattgacaaaagccatcaagatattatgaggtccaggggggtaagtgttcagccagggacaaaatgtaaagggtcaaaaggaggaggatgtgatggggctctgcagcaagtgagtgacagggcttagcaaggaccagtaccttggacagcgcctgacctttaaggtccagggcatggtgaggagaaaggtctgtctggggtaaggtctgtctcgggtaaggtaggctttagtgaccatgccggggcctgcctctgtgggctgttgaacatccagtctcaaggagtgaacatggctttcctgaaccaagaatcaaacctccaaagaccaaggaccccaatccaatgaaccataaggttgagccaatctcgaccctgcccaggagccctttcctggttggcatcagttcttctaggccaggttgtcatttctgcaggaaaggcaggagggaatccagctttgcatcctgtagggacaagatgacccttttggccacacatggtatccacctcgaccatgcaagaatctgccagctgtgaatatgtcctctaaagatatttggcatcatgctcttctgagttacttcaggataaaccagggcttatcatttatcggtgtcttagatcagatcattctttattggaggctctcctgtgcattgtaggatatttagtgccatccttgtcctctacccactaaatgccagtagaacctctccctcccacttgtaacaaaatgtcccaaatattgccatatatcttccagatgggagagaactgccctggttggaaaccacttcgataagctcatcctcttctgatgaagctggtctgcctagtgaccagactactagaacagaaaggctttccctttttgccttgccttctgggaagctcagaatgtttatttggtcttaagttccatgtagctgtagttgcaggattatcttcctgcctcatcccaggaatggtttaaaacagccttaggcattagatgaaaacagtccatagcaattaaaaaagagctggatttcagcacaacttggagcactttctgacaatgaaaatgaccagccctaggatggcttgccagggaagaacagaaactgtactggaaatgtttaatccttggggaaagacactacatcaggattattctggatgtattttatggatttatgactaaccctcctatattccactcactcccttccttcccccaaaagcctagggattaagacaaaaaaatatagaattgaatgtgagaaaccaagatttttttttttttcgaaacagagtcttgctcttgtcacccagcctggaaagcaatggtgcaatctcagctcactgcaacctccgcctcctgggttcaagcaattctcctgcctcagcctcccaaataactgggattacaggtgcccaccaccgcgcctggctaatctttgtatttttagtagagacggagtttcaccatgttgctcggctggtcttgaactcctgacctcgtgatctgcccgccttggcctcccaaagtgctgggattacaggcatgagccaccgtgcccagcccaccaagattaatttttaaaggaaaacaactttctcagtggtaagcgtcacccagcagcagaattcagacctgcctttctgtccttaggcaaaaatacaccctgaccctcactttccttatctgtaaaatgggaatgccaatagttcccgtttcatagagtggttacaggaattaaataagaggtgcatgtaccatgctcagaagagggcctggcacttggctgcagctcagtgaatggtgactaaatgtgttaatgtcttacgtcattttgttgcaaatgacagaaaccaagctccatctggctcaaggaaaaaaaggaattttattgatttagaaaaagacaggccagacgtggtggctcatgcctgcaatcccaacactttgggaggctggggcgggaagatcacttgaactcagaagttcaagaccagcctgggcaacatagtgagatctcatctccactaaaaataatttagaaaattagctgggcatggtggtgtgcacctgtagtctcagctacttgggaggctgaggtgggaggattgtttgagccaagaagattgagtctgcagtgagctattatcattccactccagccttggcaactaagcaagtttctgtctcaacaataacacacacacacacacacacacacacacagacacacacacacacacagaaacaagaaggtctgagtctggaattgggtctaatatcaggcattttgcatcaggactctgtccccctggccatctctcagtcctgtgtccctccaagcaacagcaaaggaagatgctggtagtattttccaatcattatgattagatcccccagagaagggcggggtctttccaccacgctccctctatcgaattttggtttttgttttgagacatctgtcacccaagctggagtgcagtgatgcaatctcggctcactgcaacctccgtctcctgggttcaagcaattctcctgcatcagcctcccaagtagctgggactacaggcatgcaccaccatgcccggctaatttttgtattttttattacagacgggatttcaccatgttggccaggctggtcttgaactcctgacctcaagtgatccgcccgcctcagcctcccaaagtgccgggattacaagcatgagccaccacaccgggccccatattgggatttaaggaacaggctgattggcccatttgaatcactcaccgagttgtggaccaatcactgtgcccagaggaaaacaatatggtgattggtttgcccagctcaggaacccacccctaggttatttaactccccaaacccagccaggatcacggcgctggagcccaaccttaattgactgtgtctcctaaggacaaatctgtgtcctgccccaggttgcaatctggagggtggattagctcagctaataggctcttcccagtgagagtgattgtcagctttgcagacaaggaatgttcagcgtttgggagtagtttagggtgtcagatgtcctcccataatcccagtcttatcttctacctcatcatctgcctcgtcttttagcctggggcggaaaattcagctctgaggttctcacaagatgaagcagatgattctctgctttgagaagaaacacattccagaaacttgtgtctttcttgcaagactttgctgaagattgcatgaaagctgccccaggccaggcatggtagctcacacctgtagtcccagcaagttgggaggatcgctgaagtcaggagtttgagaccagccagggcaacatagtgaggttccatctctacaaataaaatagtaataatagccaggcatggtggctgtagtcccacctactcaggaggctgagtccccaggtactcatctgtagtcccagctactcaagaggttgaggtgggaggttggcttgaacccaggagttcaaggctgcagtgagctatgattgtgccactgcactccagcctgggtgacacaatgagaccctgtctctaaaagagaaagaaagcttccccatattccaatattctggtccttaggagacacatggttagagttccatgaaaaaatcagtaactatttatttatttatttatttattattcatttatttttgagatggagtctcgctctgttgcccaggctggagtatagtgtggcacgatctcggctcactgcaatctccacctcccgggttcaagtgattctcctgcctcagcctcccaagtggctaggattacaggtgccctccaccatgcccggctactttttgtatttttagtagaaatggggtttcaccatgttggccaggatggtctcaaactcctgacctcagtgagccgcccatctcagcctcccaaagtgctgggattacaagtgtcagccaccgcgcctggccaggcaacaatttaatccgctggttttcttccacataactctagttttctgggggaaagctcttttacaaagccccgtatacatctagacaggtcgtgcattgcataacttaaggtgccctattcactttatagtccatgtatgtggcaaccctggctctctatcccatctttctttagtttgttccacattttagggttttttttaaaagattttttttattactctttcctttccaggtaataattcctaaattagtcaagactgtcacggatgcaaagaacagacatccactaaaaccagctcaaacacccagaacatttgttggtttgtggtacaggaaagaatgagttctgtggcttcaggtacggctatatccaggagctcaacaaatatagccagagctatctctctgactcttacttgtacatcttggtgcatattgtcctcagtctgcagaccgttcttttgaacaactggggaaagtggctgcaggcagaatgagccccctgtggctcataaccccagaagtagagtgagaacctccaatgtcaccttctcaacccatacctaattattgtggccaggggataggggccctttgattagagtccagctcacgtgggactgggaaggggtgttagacacatgtgcatctggagtagtggaggggaccccacaaaggaaaagaaagtactgttagattctgagccaaagaaacaacagatgtcatcacatgtatttgtaatgggatcatccaggaagtgtcaggataaggaaccaggggcataatccaattgaagttatctccaatctctcagatctgctgtgggctctgcggaaagatggaaagcaggtctcaggctgagtctaacacacatctagaaggttcaggaaggaagaaggaaccatagggtgtctctataaggaggacatggggacagaggagtatcttatagaatttgggcttgtacttggtggtttgcattttttgttttgtttttgtttttgagacggagtctcgctctgttgcccaggctggagtgcagtggtgcaatctcggctcactgcaacctccacctcctgggttcaagcaattctcctgcctcagcctcccgagtagctgggattacaggtgcctgccaccacgcctggctaatctttgtatttttagtagagacaggatttcaccatgctggccaggctggtctcaaactcctgacctcaagatccacccgccttggcctcccaaagtgctgggattacaggcatgagctaccgcacccagcctatactgggtggttttacagagaattactagggtggtattgtcgggaacctgggagcgctttgctgactaggtatttcagtgatttttgtctcagaggtgggaggatggcagttgggttggaattgtcgtcggtaagaagtggcagtcatttgtgttcacttggagagggggatgagaactcatttttgtggttgcacagggcccatgtctctatcttggttcagacatggtcacagagtggccttgcctcatcattgtttatattctgtgaccattgtttatatttagtggagaacatcgcggcccagccatcaggagctgatttccactctctctcctggctggcagcggggatctgtgtctccaaggaaagtttgccccgagcccttcccggcccggcgtagggttctccggaaaccatcactcacatctagcacttggaggcctccagggacagcggtgacccaccatctgggtaggaggctgaaaacactagaggaggaatatcccaaatctgtgccttggcgggtgttacccagaaagggtgacgggtttcaccatgcaaaaaggaaaaattggaggaaggccaggttaagcaaaaatagacatgtttttagattgcagagctgagaggcttggctgtgcctatgtgcgctgcaagtctccaagaacaacatgtgtagagttttacgaacaaagatagagtcagagacatgggcaggaggcagagacagagagagagagacagacagacacagagagagatagaggcagagaaagcaacagaggcaaagagattggaacacagagaaagagatggggacagagacacagagaaaggaacagagatgggaagacagggacagagacagagaatgaacagagatagagagatagggacggagagagacagagagagggacagggatggagagaaagagatagggccagggccacagagggactgagacaggcccaggaggagactagggatggggccagggctgcgtgcgggcggggcacggtgcagacaaaggcgcggccgcgcggtcggggtggcctggccggggacaaaggcctgcccggggggcgggggcagcgatggcgacggccgcggcgggcgcgggcgaactacaagtcccagcagctcccgctgcggccctcggccggcccctctcgctccccgggagcgcctggcggggccgctgggccgagggggccgccggcggggctggcgggcggggggcttcctgcgggcccggggggagccggcggccggcgcgggcgcggcgggccgggcaggggcgaggggcgccgggtgagtgtccctgcgagcgggctggggccggggcggggggctgggtggggggcgggcgggcgggggagctccaggcgcggggcgcagcccggggcgacctctaatcgtcccccgccctgcgcgccgccggccctggcccaggcgagcgggggtcgcgggagcgatggggaggggactctgcggccagctccggcctagcgcacccatcccgccgctggggcccggggggaaagggccaggaggttgggagccttcaatcgggcggggtggggggcgcccgccagctctggggtctggagctcaggacgccccctccctaggaggcgatccaggaccccctcccctcctgattcgaggtattgttcccacctcccgcctggggtctggagttcaggaggccctgtcctcaaaagggggacctaggggttccctcttcccccaggaccctaggaagggtcccagcgattgttcccttgcccctccagtcttggggtctgcagttctggaagctcctttccctggaggtgatccaggggtccacctgccctcacccctgggaactcaggaaagacttaagtgatttctcctcccaccttccagttaagagatgggaattcagggggctccttcccctggaggcaatctaagggttcctctgcccctgatgcaggaggggtcccaggtcttgtttcccccactctccaactatggggtctgggttgaggaccgccgtccaggaactcggctctgtttgcctgcacactcccagctatggggttgtggctcagtgtattcctttccccagaaggggagccacaggtccccccacagcttctcccaggagcagatcattcattgttgacacctcaacacccagccatggggtggggagctcaaggcatcctcccggcaggtcatcctgggctcccattgctccccagaagtggttccagcttttgtccctctacctcccagtctgcccctagccacaagctggcaattcagttcaggatccttcctgcaggaagggctacaagtgtgctgacactacccgccatgtcccagccatgggaggagatgactcaggcgttcccccattaacttcagagggtccccaggtattatttttgcctatcctccagctagaagttaaaatgcaggaccttctagccaatagggaaaacaggtatactggccgggcatggtggctcatgcctgtaatcaccatactttgggaggctgaggtgggaggatcatttgagcccaggagtttgagtccagcctgggcaacataccaagaccccatctcaaacataaataaataaataaaacaggtatactaacaactgtccccaccatcctgcctatggggttcatgagtctccctacccatccctcctcaccaggaggggtcccaaatatcactctaccatgctcactatctggctgtaggaaagggcatttccgatctgtctaagagagaggatttgacactgactcccacctggagctgtgagctctggaattcaggttttcttttccccagagggcaagccagagtcttcttgtctttccccagtgacttgggagggatacctgatgttatttgttccatattcttatcccccagacatgggttctagagctcagaatgctgctgctggaggggggcctccctaccagaactcgccccctaaattaatctgccgcctccaagtatgggacaagaattcaggccatgtgctcaggagcacagaaacgctgacacccacactgttccccatgtggggacgcccagcaagggggtaggaagctaggactgtctcctccacaggaccccagcttcccacaagaggagcccaggttggagagaggtgcagagccatggagttggggactagaaacctctagtgctgggtctcatgacctccgtccaggtttggggctgagaggggagggtcctaccatgtcccacctggttccctcaactccctgccctggctggggtaagtcagaaatctccttgcagtcagagacaagggaaggatccacgtgtatgctcagaagtgagtggggtttggccaggcacagtggctcatgcctgtaatcccagcactttctgaggccaaggccagaggtttgcttgagtccaggagtttgataccagcctgggcaacatagcgacaccccatctcaaaaaagagagacagagggagagagaaaggaaagaaggaaggaaagaaggaagaagagagagaaggaaggaaaagaaggaaggaaggaaagaaagaaagaaagagagagagagagaaagaaagaaagaaagaaagaaagaaagaaagaaagaaagaattgaagttagctgagtgtggtggtgcatctgtaattccagctacttgagaggccgaggtgggaggatcgcttgagcccgggagttccagtctgcagtgagctatgtatgatcacatcactgcactctagcctgggtgacagagtgagaccccatctcaaaaaaataaaaataaagaagtggggctgggcgcggtggctcacgcctgtaatcccagcactttgggaggctgaggcatgcagatcacctgaggtcaggagtttgagaccagcctgtctaacatgctgaaatcccatctctactaaaaatacaaaaattagccaggcatggtggtggacacctgtaatcccagctactcaggaggctgaggcaggagagttgtttgaacctgggaggcggaggttgcagtgagccgagatggtacctttgcactccagccttggcaacagaacgagaccccatctcaaaaaaaaaaaaaaaaaaaaaaagaagtgggttctgggggcacaatcgggtcccgtctctcatccctaaccagactccaaaagacacccccgctcccacagaacccacctaccctctaccctctatccttgcccttgcaggtcttgccccagaagctgcgggcacatccacgcctgaaatgcggcgctcagtcctggtcaggaacccaggccacaaaggcctgagacccgtttatgaagagctcgactctgactccgaggacctagaccccaatcctgaagatctggacccggtttctgaagacccagagcctgatcctgaagacctcaacactgtcccggaagacgtggaccccagctatgaagatctggagcccgtctcggaggatctggaccccgacgccgaagctccgggctcggaaccccaagatcccgaccccatgtcttcgagtttcgacctcgatccagatgtgattggccccgtacccctgattctcgatcctaacagcgacaccctcagccccggcgatccaaaagtggaccccatctcctctggcctcactgccaccccccaggtcttggccaccagccccgcggtgctccccgcccccgccagcccgccccggcccttctcctgcccggattgcgggcgagccttccgccgcagctccgggctgagccagcatcgccgcacgcacagcggcgagaagccgtaccgctgccccgactgcgggaagtccttcagccacggtgccaccctggctcagcaccgtggcatccacactggggcgcggccgtaccagtgcgcggcctgcggcaaggccttcggctggcgctccacgctgctgaaacatcgcagcagccacagcggggagaagccgcaccactgcccggtgtgtggcaaggccttcgggcacggctcgctcctggcacagcacctgcgcacgcacggcggcccgcggccccacaagtgcccggtgtgcgccaagggcttcggccagggctctgcgctgctcaaacacctgcgcacgcacacgggcgagcggccctacccgtgtccgcagtgcggcaaggccttcgggcagagctcggcgctgctgcagcaccagcgcacacacacggccgagcgcccctaccgctgcccccactgcggcaaagccttcgggcagagctccaacttgcaacaccacctgcgcatccacacgggcgagcggccctacgcctgcccgcactgctccaaggccttcggccagagctcagcgctgctccagcacctgcacgtgcattcgggcgagcgtccctatcgctgtcagctctgcgggaaggccttcggccaggcctccagcctcaccaagcacaaacgggtgcatgagggtgcagccgctgctgcagctgccgcggccgctgcagctgcagcagcggccgccggcctgggcctcgggcctggcctaagccctgcatccatgatgaggccggggcaggtctccctcctgggtcctgatgctgtttctgtgctcggctctggcttgggcctcagccctggcaccagctctggccgcaaccctgaccctggctctgggccgggcactctgccggatcccagctccaaacccctccccggctccagatccacccccagccctactcctgtggaatcttctgacccaaaggctgggcacgacgctggtcccgaccttgtgcccagcccagaccttgatcctgtgcccagcccagaccctgatcctgtgcccagccctgatcccaaccctgtgtcctgccctgacccctgttctcccactcgtggcactgtcagcccagccctccctaccggcgagagtccagagtgggtacaggagcaaggggcactgctggggcctgatggctgaaggagacgccggcatcctcgggggcctggggaagttgtgtgttgtgcagtcagtaaaatcctcccactgcctccgggctctgtgtcgtggcttgccttttgtgctttctttctgagcacagccccttgctccggagatgggacattgtggccagggccagccacaatctggagctccagtgtcctggcttccttcttgggcccaccagctagactttccagcttaacccacagtgtctcatcctggtccatcccactagtcaccactctctgttcctctcacttaccccttgctcttcaaagcccatacagtaggtatacaagtggacaaaaaaagttgctcatttatgcaatcaacaaacatctctggattgctggggtctcagcagggaacaagataaatatggcctcgacctgcatggagctcatagatactaaattcagaatacttaaaaaataattacggggtatagtacattctaggagaagcataacaagacttctgatataaatggcaggcagctttctcaatgaaggattttgtaatcccaataatcactaatttaataatcagtactgtttgcccagccttatgcgatagtttttgcattctctcatttaatcctctcaacagccccagtaggtagatgactttgaatatccccattttgcaaatgagaaaattgaggcacatttttttttttttttttagacagtcttgctctgttgcccaggctggagtgcagtggtgtgatcatagctcactgcagcctcgacctcctgggctcaagcgatcctcccaccttagcctcccgagtagctgggattgccggtgcatgccaccgcccactgcgctcagcttggagttgaagggactctggaagatgtagaagtggcattgtcagtgcctagatttaaatcccaattgccctccagggtccaaattcttaaccattacgctccagggcaaaagtatgcaaaggctctggggctatagaaagatgagctttggatggaggtaggagccagatcagagggccctgatagacgagagtggggactctgcctgtcattacagagcaatgggaagccgagggcaggttctcgcaggaaggataggaattattctttgaagatgcttgtggctgctgggtagagagtggagtggagggaggctgagatcggggaggaggttgctgcaaagatccaggccaggaatgttggaagactctgggctgggggccatggggtggggataagtggttctatttgatacataattaggaaatcgtgtttgctgaagatgcgcaggagaagggtaaaaggagtttctgggagaaagaggaagacagcgttgagatagtaggcagggtcatcaccaggcaccaaggaggataaggggtcaagctctggacatggaagtcacaagcctggcaccggattcggggcatggccgggagccagggcagagctcgtcgttgccaaactcagagtcagcccatcccccgccacccagagcgcgtcggcgctaggacctagcgactgccttcgacccagagggcgccggcagaggcacgcatgcgcgctgttccggcaggggttgtcgtggcgcagggggcgggaccagaggcggtcacgtgaggggctctgggctaccgggtcacgtgaccgaggcacagatcagctgatgccggagggtttgaagccgcgccgcgagggagcgaggtcgcagtgacagcggcgggcgatcggacccaggctgccccgccgtacccgcctgcgtcccgcgctcccgccccagcatgacagccccggcgggtccgcgcggctcaggtgagggcgcgggcggcaccgtggggccccgaactcaggcgggcgggctgtgtctcccacctggggcggcggagctcctagtctctttttttctaagctccagcgctgacttttcacggtggagaaaagggcagacggctcctagaacttgggcggcgggtgggcaccagcctctccaattcttcctcctgaacccaggctctgctgggttcccaaactcaggcagggatcgcgccgggccgccagcttctccctctggggcggcgaggttcctgggattcccactgggagcctaggttccgattgctcaacttcgtctggaactcagacagcgggcaccagcttctccaacccgcacgtgagactcccaggcttcccctcctgattccaggggacaaatgctcagcttccctaagctcaagcctggagagctggagggattgcccccaggcgattaactcagttttagctttccaaaccgctggaagcgcagccttcttaaattcgggcttctagccaattctgatgccacccctcctcggggaggctggaggaagaccccttgtgttagcttccccttctggagctagctggggacccctacctgatagatgtcccggtgtcccagctagtagggtctggggtgggttagctgtaatctcagctctgtaagcgggccctgccctctggctttgtcgtaaacagccacagcagcatctcattgcaaagggaggggccgggaacttgtccctctctgcaagggaggttctgacagtgcacacatttatcctgactgctttgctaggcaggaggccaggccctagaaagcagcacggggccaggccctagaaagcacatccccatgggggtgtgacagggacagttttgggctactgtgactggttttgactccagcagttgctgaaagcttagatctaaccattaggctggaaaaaaataaacagtgattagaacagcttgtgtttgctgaagaggtctttatctgctgtgtctcactgaattctcagagcagcttcaggatctcaacctcaaggctcagggagagggtggactttttttttttttaataaacttttttttgttgcccaggctgtagtgcagtggcataatcctagctcattgtaacatcgaactcctgggctcaagtgatcctcccaactcagcctcccgggtagatggggtcccagctactaactacgggcatgagccgtcacacctgactatttaaaaaaaatgttttttttttgtagacagggaggtctcgctgtattacctaggctggatcctcccaccttggcctcccaaagccgttgggataacaggcatgagccactgagcccagccaaggggtcgcctttttaaaatttccactcttcagatgaggagatggaggctcagggaggtacctggagtcaacctactgtaaagtggcaggtctgggatttgatgctagggctgcatgatttctaggagctggtgcttttcagggagataaaatgagtctttagcgaatgtgttccattattattacttatgttgtcaattacctcttctccaggtccttggcttctgagagtgtcagctgatgggccaggttataatgaacccagaggtcatcttttgggtatttgtccagacaaacctagaatacaggctgagttctatgctcatgtctggaagctggagttgggataagcccagcaggcttgaacgcccagtgaaaagccagtgggagcagttcattctctccccactgatcaataacgggaacattgatgaaatgttctgacattcaccatggaccagcccctgtgatcaatgcttcataagcatccagtccttagcgttcccatgagacatattattgccccatttcgcagatgaggaaactgaggctcagagagctggtgagcaggaggggcaggaatcagcccaggccctgtacctcccaaacccaaactcataacctctgagcaggacgggtgcatagatacctacaatgtcacaggttttctggttttctttagacctctcagagctcttccttggcaggagcatggggacatgaagatagggcgtgtgctgccttcctggttggagaaaggggaaaaggggagttgcccaggcctcaccccagtgccctctcctattcccacagagaccgagcggcttctgacccccaaccccgggtatgggacccaggcggggccttcaccggcccctccgacacccccagaagaggaagaccttcgccgtcgtctcaaatactttttcatgagtccctgcgacaagtttcgagccaagggccgcaagccctgcaagctgatgctgcaagtggtcaagatcctggtggtcacggtgcaggtgaggccagccaagcaggggccccagctgaaggccacctgtggctgctgtgctccttgaagagagtcttaaagcagcactttggaaggccgaggccggtggatcgcttgaggctgggagttcaagaccagtctggccagcatggtgaaaccccatctctactaaaaatacaaaaaaattagccgtgcgtggtggcgggtgcctgtaatcccagctacttggcaggctgaggcaggagaatcgcttgaattgggaggcggaggttgccgtgagctgaaatcatgccactgcactccagcctgggcaacagagcaagactgtctcaaaaaaaaaaagaagccgactctgaggctcagagaggttaggagacttgcccaaagtcacacagcaatagaacattgggagctgggatttgaacccaggcagtctgacaccatgttgacccaatggctgcacagatagttctccctcccccatgccagaccctgtgctgggctctgggaaccccaagatgaatcagacccagccactgccctaagtgcttacttcatgttttgggctgactttagcatgtcaccatgcctctaattttccctctgaaaagggacccaattgtccaggcatggtggctcatgcctgtaatgccagcactttgggaggctgagttgggtggatcatttgaggccaggagtttgagaccagcctggccaacattgcaaaaccccgtctctactaaaaatacaaaaattagctgggtttggtggcaggtacctgtaactcagctactcaggaggctgagacaggagaattgcttgaacccagggggtggaggttgtagtgagctgagatcataccatggcactccaacttgggcaacagagtgagactctgtctcaaaaaagaaaagaaaagggacccagtcatggtacttaccctgaaagtttgggtttaacacagaatcggacatccagtaaacatttaatgaacgttagtccctgcagtgagatagatgagtccccaccctgtgttgtacgggggaggacacagtggtgggcgtggcatggagcttatgccaggaggtggggtgaaattaatcaaagcaaagaaatgcacaagtgaaatccgtgtttgtggcccaagttagcagggccctgccccaccccagtggacatctgcagggccctccctgtcctcttccagggcctgtgccctgagggagatacaccccaacccccatcctagccatgccaacctctactaccctctccccagctcatcctgtttgggctcagtaatcagctggctgtgacattccgggaagagaacaccatcgccttccgacacctcttcctgctgggctactcggacggagcggatgacaccttcgcagcctacacgcgggagcagctgtaccaggccatcttccatgctgtggaccaggtgctggtgggcgggcaggtgctggtgggcaggcaggtgcaggtgggcgggcaggtgcagttgggcgggcaggtgctggtgggcgggcaggtgcaggtgggtgggctgcagagagcgggccggactcacaggccctccccttctctgcccacagtacctggcgttgcctgacgtgtcactgggccggtatgcgtatgtccgtggtgggggtgacccttggaccaatggctcagggcttgctctctgccagcggtactaccaccgaggccacgtggacccggccaacgacacatttgacattgatccgatggtggttactggtgagtgggcaggacgaggcttcactgttgggagcctgagctgctgggattaaaatcaacagctgtggctgggcacggtggctcacgcctataataccagcactttgggaggctgaggaggaaggattgcttgaggccagaagtttgagaccagcctgggccacgtaggaagaccttgtctctacgcacaaacaaattagctgggcgtggtggcgtgcccctgtggtcccagctactcaggaggctgaggcaggaggatcgcttgagtccgggaggttgaggctgcagtaagctatgaccacgctgctgcactccaccctgggtgacagagtgagaccctgtctcaaaaaaaaaaaaaaaaaaaaaaaacaagtatgcttagtgtgagtgtgactcttgccacgtagaaagcaccagatgttatattttaatatggctcattcagtaaaacatccgcaggcccagagagtgccaggcctgtaggaatgacccaaccctggggaagcacagggaagaaggccactggggactctggggagaccagcctggcctccccggccccctgaggcccttccctgactccctgtccttagactgcatccaggtggatccccccgagcggccccctccgccccccagcgacgatctcaccctcttggaaagcagctccagttacaagaacctcacgctcaaattccacaagtactgcctgctcactcgaggggggcccagggtgggggaggcagcacactaggcactctcaccccagcaactacttccctaaggtggggacagggcccccccgcccgcgctggtgcctgctgggtgagcacttcccctgccagctgcagagtcagcacgtggcaggggacgctggcacttggggccggaagggacccgaagacgcccctgaccctcacccgagcctcctgcctaggctggtcaatgtcaccatccacttccggctgaagaccattaacctccagagcctcatcaataatgagatcccggactgctataccttcagcgtcctggtgaggccccccgggaacccacagggctcctgagttccagggcagggacctggtcagggagtgtcttgggagcactggccaagggcaagcgtgcgggtgatgagggagggagcccggggtctgtcaggccacctgtcatgtggaccttggggcttggggctgccaaggtttactctgcccccaactggcccccacagatcacgtttgacaacaaagcacacagtgggcggatccccatcagcctggagacccaggcccacatccaggagtgtaagcaccccagtgtcttccagcacggtgagcccctgagccccagaccagcactgaccaggggccctggcctgtcctgggattccccaagccccagatcagcgctgcctgggggccgtgacctccccaggaatccgctgagcctcagatcagcacagaccagggaccccgtcctgtgctgagatcccccaagccccagaccagcactgaccggggttcttgactcaccccaagcaagccctgagcccactgaccaaccaaaaccagccgtgcagccccctaggtctccagcctggcctggcaccaatgctagcctcccaaggctccatgccatccttggccctacccgctctgccctccccgcaggagacaacagcttccggctcctgtttgacgtggtggtcatcctcacctgctccctgtccttcctcctctgcgcccgctcactccttcgaggcttcctgctgcagaacgtgaggcttctgcgtcatgtgtgctggtgtcctccccgcctggccctggggcgataaaagccagggctttgagggtcctgtgcctggtcaggccctcaccccgcctgccttctgcaggagtttgtggggttcatgtggcggcagcggggacgggtcatcagcctgtgggagcggctggaatttgtcaatggctggtacatcctgctcgtcaccagcgatgtgctcaccatctcgggcaccatcatgaagatcggcatcgaggccaaggtgcgtcctgccaacaccctgggccccaggtcccatccctgctgtcagtgcctatccggggccatatcctcccccaggccccccaaaggaagggctgggccagataggttgacgcagctcccacccgcagaacttggcgagctacgacgtctgcagcatcctcctgggcacctcgacgctgctggtgtgggtgggcgtgatccgctacctgaccttcttccacaactacaatgtgagttttgcacatgcagctgggccttccacatggttactccacaccctccaaataaatccctacacacgcagccctcaccagccccggccaatggccccttgcaagcctcctcctcctacctgcccacaccagatatatctgtcactgcacctgcgcggggccccgggagcctgctcctttgtgcccacccagctgagtctagccgtgcgttgccctcggaccccctcagacgtggccacgccccctctaggcacccactggctcccatgaccacaccggctgtgccctcggcaaggccccgcccctcccacccccatctgggtgcccacagctgacctgagttgtggccacaccctcaacgaggctccctctgccccaacccagatcctcatcgccacactgcgggtggccctgcccagcgtcatgcgcttctgctgctgcgtggctgtcatctacctgggctactgcttctgtggctggatcgtgctggggccctatcatgtgaaggtacatctaacccctgatgtccctgacattgaccctgtgaccttgtcattgacactgtgacccccagatgaccccttggtgactgctgggagtctgtccactgtcccctgtggtccttggtgaccctgacactgaccctgtgccattattgttgtcacagttgttgatgaccctatttcgacctgaattactcccctcctgctctatctacccagaccctaggtcggccctgtggccctgtcattgacccgtggtcccggccattcacatgggaccccagcctgggacctggccattcacatagtgaccccagcctgggacccggccattcacgtgggaccccagcctgggtcccggccattcacgtgggaccccagcctgggacccggccattcacaggggccctagcctggaacccgaccattcacatggtgaccgcagcccgggacccggccattcatgtggggccccagccaccagctcctagccatttgcatgggaccccagcctgaccccagcccccggttcctggccatgccttggctccctctgaccccgccgcccctctggcagttccgctcactctccatggtgtctgagtgcctgttctcgctcatcaatggggacgacatgtttgtgacgttcgccgccatgcaggcgcagcagggccgcagcagcctggtgtggctcttctcccagctctacctttactccttcatcagcctcttcatctacatggtgctcagcctcttcatcgcgctcatcaccggcgcctacgacaccatcaaggtcagccgcatgcacccagccctgagctcgggctctgggtgccctggagtctgccatgagggggtcttggggacaccgcagggtgaacagagaagacccaggagagaatatgggagactctatgaaaccaaaaagagggtggttcagaactggggggcgcagggggatgtcaaggtgggcttgggccaggagggggcctgagtcagtctttgccaacagggcaaccgagtcatagagtttatttatttatttgtttatttgagacggagtcttgctctgtcacccagggtggagtgcagtggtgcgatcttgactcactgcaacctccacctcccgggttcaagcaattctgtctcagcctcctgagtagctgggactacaggcacacgccaccacgtccagctaatttttgtatttttagtagagatggcatttcaccgcattggtcaggctggtctcaaactcctggcctcaggagatctactgccttggcctcccaaagtgttgggattacaggcgtgagccaccacgcccggcctattttattttattattaaagtattgttctttattttattagagacaagggtctcactgtgttacccaggctggtttcaaactcctgaggtcaagtgatcctcccactttggcctcccaaagtgctgggattacaggcgtaagccaccacacccagcctattattattattttttttttgaaatggaatcttaccctgtggcccaggctggagtgcaatggcatgatctcggctcactgcaacctccaccttctgagttgaagcgatccttgtgcctcagcctcctgagtagctgggattacttgcacgtgccaccacacctggctaatttttgtatttttactagagatggggtttcaccacgttggccaggctggtctcgaactcctgacctcaggtgatccacctgccttggcctcccaaggtgctgggatttcaggcatgagccactgaacccagctaagtcatacagtttcaatgaccttgtcattgaccctgggacgttgccattaacatggtgatcctcagctggccccattcctatggcggacctctaaaaacccaaccctgaccccagcccccagccatgcccccgactccctctgaccctgcccaaggttagcttctttatttatttattttttttgagacggagtctcgctgtgtcacccaggctggagtgcagtggtgcaatctcggctcactgcaacctctgcctcccgggttcaagcgattctcctgcctcagcctactgagtagctgggattataggcacacgccaccatgcctggctaatttttgtatttttagtagagatggggtttcaccatgttgaccaggctggtctcaaactcctgaccttgtgatccgcccacctcaggctcccaaagtgctgggattacgggcgtgagccactgtgcccggcccaggttagcttctgagcagtaaaactgggctcaacccagggctgtctgattccagaagccgtgctcctaacccctctgtcctcagtttagtagggtggctgggaacagtggtttccctgcaagctgcaagggtcaggggacagagcaggatgcggaagtggcaggtagataggattctttcagcagatatatctaagggccaagatctgtgctgggttctgggcatggaggaaaatcaggtgtgcatgatccgtccaaggcctgtgggcaaggatggcacaggaacagacatcccatgaccaatgacctacttgtaacaggtatgaaggaagagtggaaggttgcagagggacccctgctttagattggtatgacaggagatccaggagagcttctagaatgttctatccatcactagtctctagccctatgcagctatttaaattttgattttaattccggctgggcacggtgactcacgcctgtaatcccagccctttgggaggccgagggggggtgggggtggatcacctgaggttaggagttcgagaccagcctggccaacatggcaaaaccccatctctactaaaaatacaaaaaattagcggacgtggtggcaggcacctgtaatcccagctactccggaggctgaggcagtagaattgcttgaacctgggacgtagaggttgcagtgagccgagatcaagccactgcactccaacgtgggcgagagaccgagactctgcttcaaagacaaaacaacaattttttaaaaattttaattcaaatgaagtacaattgcaaatttagcctctgacttgcaccatcctgtatccagtgctcaaaagccagtgtggctggtggctgccatattggacagcatagatattgaatacttccatcgcctctagactgaagagatgggagcccaggggcagtgcaccgaggggaaggaatagctaaagcaaaggtctagtagcctgaaaaaacttggagaaaagatggcccctccatgaggccgagtgagaggaaggaagccttggctgggaccctgccacatccaatgtcaccggcagatgggtacacccccttttccccatgcatggattcagctgtcccacagacacattgactcaggcccttggaactacttcctgtcttgccttagcacgtagacatcacacacatgcatccactcaggtgggcagtctcaggccctgctcccactgctgtgctcagcgtgcatccagctcactcaatagatggtttctgagcatcgaggtcatgtcagccctggctctaggtctgtaggtgctggacctacagcagaaggcaaagacacagactggcaaagacacagcttgtatccaggttcaggggtcagggaaggtccctctgtgcaagcaaactgtggaacaacgggtggagcaggcccagcaagtgcaaaggcccggaggtgggaagcgatgcagatatggctggaggggagggcggacttcaagggccttggaggttgggagccactttcaggctgagcctcccggcttctctccccagcatcccggcggcgcaggcgcagaggagagcgagctgcaggcctacatcgcacagtgccaggacagccccacctccggcaagttccgccgcgggagcggctcggcctgcagccttctctgctgctgcggaaggttcgagtcccgggtctggcacattcagattggaggttagggaatggggaaaggggagcgagccagagaaaactgacgcccctcttccctgcttccttcctccagggacccctcggaggagcattcgctgctggtgaattgattcgacctgactgccgttggaccgtaggccctggactgcagagacccccgcccccgaccccgcttatttatttgtagggtttgcttttaaggatcggctccctgtcgcgcccgaggagggcctggacctttcgtgtcggacccttgggggcggggagactgggtggggagggtgttgaataaaagggaaaataaatgtgtcgttttcatttttagcgggaggagcagtccttgcgttaagcggtgtgaggccctttaaggcgcggccacactcagcatggcggcctcagtcggccttccaagcatggcgcggggaggaggggtgggagggtcgggagggactgcggtgcgactaggagtgaataatttaaaggggccgtgcctgcggagccgggcggaacgctagcggtgttggcgcggagtggaccccggctgcggcccctgggtgagtctgggtttccgttagcctcgcaggggtgtcccttcgagggtcgttagcgagcctccgctttcccacgatctgtcctccgattcctgttaactctagactttctgatgttcccataccccccacgtctcggcaggtgtttccacaccggtagccagctgtgccctgaggtggaagaggaccggccacccaggaattttccaagtaacgactcggagtctccgggattcctatctcccggcccccgaatttccattaatattctagcgatgtcagaaacatcctcagcttcccagaaaaatcccagtaatattccagcatctctcagtatcttccaaggagcccggacgccctccccaggcccgctctcataagcaccccaggaatgtgcccacccacctcctggttttcccagcagtagtattgtaatcctcagaatctcagtaactttccagtgaccccgcatccccacccactaatcccagcgtctctggttacgcctcccagcaatggcgccaccatcggtcccggagtcccagtgatgctctgtgccatagagcccccataacttcactactacgtgatagtaaatccccggcaaaaaccagcagcgccttgcaagcccacgccaccccaagcatcccaggactcttctgaaacgtgggtatcagacgccttccgcggatgccccggcagtactcccgtgcctcccagctcctgggtcttccccggggcaggcttgcgtcgggagccgagtatctaggtgcccactcccggaccccacggtttgcgggcccgttttcctggggtggggcattcagtcttcgacggagtagggggtgcggcctggggggtggggtggtcaggcttgatcaaccctgcagagggcagtgacccgggaggaagtcaccaggtgcagaggaccgtgccctgtggggacctgcctgcaggctgctgacagtgggtaccaggtcggcctttggccccggggtggggttggacaggcgggcgtctggtaggccctacgcgtaggcgaagggagcaggaagccggggacccgcctcatctcctggccagggccgagaggtcggtttgctccatcccttagtcccgcagcgcccctctagcctcgcccctggcagctggagacgcttcccccgccaccccagagggcagggcttgagctgggggcagggcttgaggcaggggagaggtgggcccagattgacgacttgcacgggttccttcgactccttgatttcccaggactccgggctaccagatcggccgtccagctggaatcaaccgatggaggctccgctgcaaactggaatggtaaggggtggggcggagaccgggtaggtgccggcgtggggcgccaagaggactacaactcccggcgtgctcagcgcgcattacgtggtctggcgataacgcgctgcgtccgctcgggcggaactacgtttcccggcatgcactgcgggccgccgggcctcagggaagagtcgcgcccccggggagggagcagcactggcccattctgcagatggggacatcgagtcacgggctggctacgaactcctcgggggcgaaggtggcggagagggatgggttccaggacgtcctggcgcccggggaaggctcggcgggacggatttgcggtgcgcagccagtgccgttcgtccctcaggtgcttggcgtgatgatcggggccggagtggcggtggtggtcacggccgtgctcatcctcctggtggtgcggaggctgcgagtgccaagtgagcacccgaggggcccctcttgggaggctgtatggtggggggcccaaatgcccgggtcccgaggcggcagagatggggatttgctggcgtctgttcgcggtaccccagctctggcagggtggagtctgcacagagctcggagtgcccctgtccccacctatccccagaaaccccagccccggatggcccccggtatcggttccggaagagggacaaagtgctcttctatggccggaagattatgcggaaggtgagtccgggacccctggggtccgccctgaccacacagaggccgcgccccttccctatttacacttcttagtgtccgccaccgctccttccttgatggagaccccctggatccgtctgcctcttctccaaggtctgaattagcaattcacccatctccgccttcattctcccaggtgtcacaatccacctcctccctcgtggatacctctgtctccgccacctcccggccacgcatgaggaagaaactgaagatgctcaacattgccaagaagtaaggctgtgctgggtgtgacctggtattaggggttatctcaggggccttttgagtaatcagcttacaccaaagtgttgtggaagtcttcccatattggctgcgcgctgtggctcatgcctgtaattcccagcactttgggaggctaaggcgggcagatcacctgagatcaggagtttgaggccagcctggccaacatggcaaacctcatctgtactaaaaatacaaaaattagctgggcgtggtggcatgggcctgtaatcccagctactcagaagggtgagacaggagaatcacttgaatctgggaggtggaggttgcagtgagctgagatcatgccactgcactccagcctgggcaatagagtgagactctgtctcaaaaaaaaaaaaaaaaaaaaaaaaaagaagaagaagaagaagaaagtcttcctgtttcagagagacatctctggactctcctctcagagctcttccacaccagacatgctgtctctagggtatctcttccctgagggctacctcagtgaccttctccttccactggagtatctgagctatttgttcccaagtcaatatctcagaggtcttgccatatacttagtgggggggtctacatcaggggtttccatgtaggttatttcatgagtctcttcacatgagtggttttcttccagggtacctcactgaggtaattgtgtttctacgatctcctaaaggggctatctccagcctccagcctctcttctccgggggttatctcaggcatctctgtacatcagaaggcatctttcctatgttatggaccttgaagttcttcccacactaaggaggctgtctcaggagtttctgttccctaggggctatcttatgaattttcttgcactagaaatataggaaggatgcatcagagatccctgttggcagcaaggtctgcgagaaaggctctccaactctctttgcaagttgggtgctggctctgggatccctgtgcgtcatgtagtctacctggaggtctgcctcaagggtttcttcacaccagggcagggctctccatgatcaatagtcctgcaatggcagtcctttcttttttgtttgtttgtttgtttgtttttgagatggagtcttgctctgtcactaggctagagtgcactggcacgatctcggctcactgcaacctccacctcctcggttcaaaagattctcctgcctcagcctcccgagtagctgggactacaggctcataccaccatgcccagctaatttttgcatttttagtagagacggggtttcaccatgttggccaggatggtctcgatctcttgaccttgtgatccgtccgcctcggcctcctaaagtgctgggattacaggcatgagcgactgagcccggccaatggcagggctttctgtgagttgagtagaaggactatctcaaagttccccatgatcagttgagggtctatacctcaggtttctccacatcacaggagctgtctgtagtgtttgcacactcttaagggactaccctgatatcttcatgattgtcagagggctgtctgagctttctgtgacctagggaagagttagcccaagatctccctgatcaaaaaaggaataatcataacaattataattattattattattttggagacaggatcacactttgttgttgaggctagagtgcagtggcacaatcacagctcactgcagcctttacctcctgggctcaagagatctctcctgcctcagcctcttaagtagctgagaccatgggcatgcaccaccatgcctggctaatttttaaatttttttgtagagatgggagtctcactgtgttgcctgggctagtcttgaactcctggcctcaagcaatcctcccacctcggcctcccaaagtgctggtattacaggcatgagccaccacgcccagccaaaaaaggaattatatctgaatttcttgatttcactgagtttaactcagggtcccatcctccaaggtctatctcagggatcttttgccagcggagggtctttctcagcaatcactgtgacttgtggggaagggctctcccaggtccacgattagcagaggggctatctggattctccacttataatgagggctacttcagggacctctgtggctgtcagaggggctgtctcaaggttctctgagactgggaggaaggtctatctcaggaatgtttatgtagaacagagagactgtatctgcggtcttctcatatattggaagctatgtcaaaggcatactcacgttaaggggactatctcaggaatctactctgtgactactggaaggaccgtttcaggacccccatgataaacacaggtaccatttctgggcctacccttatcttggaagctatgtcaggggtctgccttcctaaagggttcagctcaggggcctatgcctagtggaggggccatctcagagaactttaggtctggggtcatagggtttttccataaagggccagatagtaaatgtttcaggctttgctggccacatatggtccccattgcaactcttcaactctgctgcatgggagcagccataatgatatgcaaatacatgaatgtggctttgtaccaataaaactttatttaccaaaataaatgtggccagccgggtgcagtggctcacgcctgtaatcctagcactttgggaggctgaggcgggaggatcacttgagttcaggagtttgagaccagcctggccaacatggggaaacctcatctctactaaaaatacaaaaaattagctgggcgtggtggcacccacctgtagtcccagctacttgggaggccgaggcaggagaatcgctttagcctgggaggtggaggttgcagtgggccgagatttcgccactgcactccagcctgggtaaaagagcgagactcctgaggcagggcacagtggctcacacctttaatcccagcctttgggaggccgagtcgggcggatcacctgaggtcaggagttcgagaccagcctgcccaacatggagaaaccccatctctactaaaaatgcaaaattagctgggcgtggtggcacatgcctgtaatcccagctactagggaggctgaggcaggagaatcgcttgaaccctggaggtggaggttgcagtgagccgagatcgcaccattgcactccagcctgggaaacaagagcaaaacttcgtctcaaaaaaaaaaaaaaaaaaaaaaaggtggccagcctgatttggccagcgggccagagtttgctgtacatgagccctggggaaaggggtatgcgggggtcttaggtttgcctgagccttctccgtgcccccctcacccccggcacccctcccctcccaccaggatcctgcgcatccagaaagagacgcccacgctgcagcggaaggagcccccgcccgcagtgctagaagctgacctgaccgagggcgacctggctaactcccatctgccctctgaagtgctttatatgctcaagaacgtccggtcagtgttggggtgcaggtgggggtggagggctgcagacgtggggccgccctgacctccagcctctgtcgcccaccgcctgtccaacagggtgctgggccacttcgagaagccactcttcctggagctctgccgccacatggtcttccagcggctgggccagggtgactacgtcttccggccgggccagccagatgccagcatctacgtggtgcaggacgggctgctggagctctgtctgccagggcctgtgagtgggcctccccaggggctgctgcaggaggatgggtggtggggatgggcagcaggcattggtctgtagagctggtggtctttggagatgcgtcatcgggagtcaggggaacgggtgaccgaggacatttggggtagtctgcgtagttgctcagtagttacaagtattgaacgatgggagatgcctgctcgttggaagggttggtgggttcccctgagaagggatgagaagtgtcagtgatcattgggatggatgagggggcgacatgccagtcaccagggcgaggccactgagggtccacggtctcctgtgtctcaggacgggaaggagtgtgtggtgaaggaagtggttcctggggacagcgtcaacagccttctcagcatcctggatgtcatcaccgtgagtgaccagtttctgaggcaggggggctggggtgcaaggtcccacccaagggactaggttgaaggaaatcacagggtccccaatctctggttcatccgttatgctgccgatggcccctcacgggactggcgccaggaaggattaggggagtagcgagggggactcgcagcctctgcccttgtctctcttcacgccctcccctcccccagggtcaccagcatccccagcggaccgtgtctgcccgggcggcccgggactccacggtgctgcgcctgccggtggaagcattctccgcggtcttcaccaagtacccggagagcttggtgcgggtcgtgcaggtcagtgggccttcgcctcctgtcaccccctgagggaccccaccctggcccccacccattccaggctccaagggaccgaggcccagcagccagcaggcgctggagctgtggttatcggcctggagcagccagatgtctgcagccgcggactcctcccttagctgcctcgccccatttccccagactgtgggtctctccctggttcccgcccgaccccttatgctgcgaactagcccggcccaccatctggccctgccccttaccccgccccatcttatggccacgcccctcgagccctgcagatcatcatggtgcggctgcagcgagtcaccttcctggcactgcacaactacctgggtctgaccaatgagctcttcagccacgtgagtgggtggcggggagcgagcacaggggggatgggggcgaggtctccctcccaggacaggccacaagctgttctctgcccccaggagatccagcccctgcgtctgttccccagccccggcctcccaactcgcaccagccctgtgcggggctccaagagaatggtcagcacctcagctacagacgagcccagggagaccccagggcggccacccgatcccaccggggccccgctgcctggacctacaggtacccagggacccgaggccagccgagcccaatctcccaggaagccccgtctcagccgccagcccctttttcagttctgcatagagtcaacctgaccttgtccagccccacagggactccatagcggggtacccaggtctgactcctatctggtaccgaggaagctgtggcctcgtccccaagggcccattggaattgctttaactagttaatcagtcgccagcatctccttatctcccaacctgctaatcctcctagtggctctgaggggcaggagcctgaacatgtgtctcccccaggggaccctgtgaagcccacatccctggaaaccccctcggcccctctgctgagccgctgcgtctccatgccaggggacatctcaggtttggagcactgggtctgcggggagggccatggagcttccaggtttgaatccaggtccaccgcctgcctgtcttgattgttttaatctgcgaaatgggaacactgccagtacttccccaggcactgttttgtagatattcattgagatagtgcttctcccacctgttaagagggattcagagggagagtgcaggcgttgattagtcatgtctgctacagcagtggcccatggcacattggtatccattggtctcagactgcaactgtggttactctcatctttttcttttcttttgagacctgtctcccaggctagagtgcagtggtgctgtcatagctcactgcagcctcgaactcctatgctcaagtgatcctccagccccagcctcccaaatagctggaactacaggcctgcaccactacacctggctcattttttaaaaatcttactctcatctttatggtttttgttgcccccctgcctgcctgcaggcttgcagggtggcccccgctccgacttcgacatggcctatgagcgtggccggatctccgtgtccctgcaggaagaggcctccggggggtccctggcagcccccgctcgggtaaggcttgggaccctgcccggtggtggagcccgcaggggaaggtggctgggagggagcatcaggaggtcacaagcctgccccactcagacccccactcaggagcctcgtgagcagccggcaggcgcctgtgaatacagctactgtgaggatgagtcggccactggtggctgccctttcgggccctaccagggccgccagaccagcagcatcttcgaggcagcaaagcaggagctggccaagctgatgcggattgaggtgggcagccgaggggagctgggcacagggcgcaagggaggcctggctgcgcccatctcaacccccctacctccccaggacccctccctcctgaacagcagagtcttgctgcaccacgccaaagctggcaccatcattgcccgccagggagaccaggtgaggctgacccctgacctgtaaccatgccacctgagatcattccctatgacttctgtgacctctgatccctgccctttgactgtaagaccagcaccttctcccatagaagcagacctctctcatcctatcatttccaacctctaacccttgggtcctgtgacccccaccccctaaccccaccctatgtcctctggacctgtcaacccttcacctgtgacccctgaaccttttgccctaggactccaactcctagatctctcctgcctgccctggctcttcctgtaattctgttttctgaacttctgatcctgcagtattcactaacatgtctgcttctcatgctgaccgctgccaggataggggctcaataaatggctacaaatcgccatctggcctcggaaggccatgaaccagccctgggtcggggtttcagggccttgtggcggcacccaggatgtgtaggaaaatgtatcctaccattctgtccactgtccatatggggaaactgaggcccatcaagggttagtgacccgactaccagctgaaagtcaggaagcctcagggtaggaggaggaggaggaagaagaagaggaaagttgaaacccacactctgtccccagagtgtggcagatgatctagaaagttctctgcttcctcatcagtggaatgaggtaataaagaagagatgcctagttcgcagaaccccagtaagacttcttttttttctttttttttttttttgagacggagtctcgctctgtcacccaggctggagtgctgcagtggcgtgacggtggctcactgcaagctccgcctcccgggttcacgccattctcctgcctcagcctcccgagtagctgggactacaggcgcctgccaccatgcccggctaattttttgtatttttactagagagggggtttcactgtgttagccagggtggtctcgatctcctgacctcgtgatccgcccgcctaggccttccaaagtgctgggattacaggcgtgagccactgcgcccggcctttttttttttgttttgagacagagtcttgctgttgtcacccaggctggagtgcagtggcacaatctcagctcactgcaacctccgcctcctgggttcaagcaattctcctgcctcagcctcccgagtagctgggattacagggttgtgccaccacgcctggctactttttatatttttagtagagatggggttttgccatgttggccagccttgtctcaaactcctgacctcaggtgatccgcctgcctcggcctcccaaagagctgggattacaggcatgaaccactgtgcccagcctactgagacatttttgattgttaggatttcacagggtgctgttcctgacacctgatgggtagagatcagggatgctcaaatgtacagagcagcaggccggaaccatacagtccattatccacagtgtggggtttgcaagagtgacaagtggtcagggagggtgtttagcagcagcttatagggagcgggggcttgaggtgacagtgagctgtcataggcactgggaccccagctctgccccaggcttgggggagagaagcctggggcagggttggggtggggtgggagctgtggtcccactgttagccggctggagtgttgctgtgtcacttgacccagtgactctgctgtccccttgaaccacccatggcagggatgggctcttttctggagaggaagtcaaggcttttgccagctgttcttagaatagctgaggaagtaaggttaccctgtggcttctttgggggcccctgggccctgcttatctgggagactgctggccacaacccagccctggcctgtcagtgtaccacgctggtctgcagcccctcagagcttctctgcgttggcaggacttttgttagggaccctgtgctctcctgtgcttctccttgaaactttttttttttttcggagacggagtcttgctctgtcgcccaggctggagcgcagcggtgcgatcttggctcactgcaacctctgcctcccggattcaagtgattctcccacctcagcctccctcgaagctgggactacagtcacgtgccaccacgcctggctaatttttgtagttgcactagagatggggtttcaccatgtcggccaggctggtctcaaactcctggcctcaagtgatccactcgcctcagcctcccaaagtgctgggattacaggcgtgatcctcggcacctggccacagtctggaaattctgtcttagaaggttccagcatgtgtttatatctcctgggactgtgcctcacccaggggtccctgcagtgttttggcaggtggagcttcactgggtaccagacaggttggtgtggtggataaagaaggaatctctccatttctgggcggtttcagttccttatttataaagggatggaacaggaaggtttctagctggtcaggctacccaaagaagaaagaaacgtgtttacccagcatttgccccatctcgaactgtgtgctgctggctggacaagaggcaggaaaatggctgggcacggtggctcacgcctgtaatcccagcaccttgggaggccgaggtgagaggatcacttgaggtcaggagttcgagaccatcctggccaacatggtgaaaccccatttctactaaaaattcaaaaattagtcaggcacgatggcgggcgcctctagtcccagctactcgggagcctgaggcaggagaatcacttgaacccaggagacaggttgcagtgagctgagatcgcacccctgcactccagcctgtgcaacagagtgagaccctgtctcaaaaaaaaaaaaaaaaaaaaagtgggcagggaaaacccttagtggtccctgcccttgggcagcccaccgtattctgagagacatgactcaaaggattacacaaattcttgtaaaatcataagtgcttagtgtcacaaaggaaatgatcttggcactacaaagtctggcttagacagggtggcacctctaagggcatgacctaagaaggaaggagggggaggaacaaactgggtgcaggtgggaggaaaggtcattctaggcagaaggaagagcttgtgcaaatgttgtgtggtgggaagaaataggttgatctctaagaaataaaaaaggaagtcagtgggcctcaagtgaaacaatattttttgggggggtgtaatggttttattgagctataattcatgtactatacaatttacccatttaaagtatatactttaggctgggcacagtggctcacgcctgtaatcccagcactttggaaggccgcggcgggaggatctcttgagtccaggagttcgagaccagcctgggcatcatggcaaaacccagtctctacaaaaaacaaacaaaaaaaattagccaggcatggtggcgcatgcctgtagtcccagctacacgggaagctgaggcaggcataagccactgcacctggccatgcccacctaatttttgtatttgtagtagagacagggtttcgccatgttggccaggatggtcttgaactcctgacctgaggtgatccgcctgcctcaccctcctaaagtgctggaattacaggcatgagccactgcacccggccttatgtaagggcttctgtgtagacatatattttatttatttttttaaaggtggggtctcactatgtttcccaggctggtcttaaactcctgggctcaagtgatcctcccaccttggcctcccaaagtgcttggacatatgttttcatttctcttgggtatatacctaggagttgaattgctgggttataagccaattcaattttttttttttttaagagggagtctcgctatgtcgcccaggctggagtgcagtggcgcgatctcagctcactgcaacctctgcctcctaggttcaagcagttctcctgtctcagcctcctgagtagctgggattacaggcacacgctgccacgcccagctaatttttgtatttttagtagaaacacggtttcaccatattggtcaggctggtcttgaactcctgacctcaagtgatccatccacctcagcttcccaaagtgctgggattacagatgtgagccaccatggccagcctctatttttaatttttttaagcactgtgtgtttgtttgtttctttgctagactgttttccaaagcagcggcaccattttacatttccactgacagtgtatgtgaattccagtctctctacattctctctaaccctttgtaattctagccatctttgtgggtgtgaagtgtagtatgtcattgtggttttgctttgcatttctctaatgacttgacgttgaacagctttttatgtgcctattggccatttgtatatcttctttggagaagtttttattcagatcttttgcccattttactcttactttttttagagacgggggtctcactatgttgcccaggctggtctccaactcctgggctgaaactatcaagcgatccttctgccttggcctcccaaaatgctgggattgcaggcgtgagccaccgcacttggcctttaatttattttagagacggggtcttgcactgtagcctaggctggagtgtagtgacgctatcatagctcactgcaacctcaaacatctaggctcaagcaatcctcctgcctcagcctccagagtagccaggactatagacacatgctaccatgcctggctaattaaaaattttttttttttttttttttttttttttttttgtagagacagggtttcactatgttgcccaggctggtcttgaactcctgggctcaagcgatcttcacacctaggcctctcaaagttctgggattacagttgtgggccaccacacccagccccttcagtatactttaaatcaggggtgtccaatcttttggcttccctgggccacattggaagaattgtcttggaccacacataaaatacactaacagttatagctgggcatagtggcacacacctgtaatcccagcactttgagaggccaaggcggttggatcactgaggtcaggagttcaagaccagcctggccaacatggtgaaaccccgtctctactaaaaatacaaaaattagccaggcgtgtggcaggcacctttaatctcagctacttgggaggctgaggcaggagaatcacttgaactctggaggcagaggttgcagtgagccgagtttgtatcactgcactccagcctgggcaacagagcaagacaccgtctcaaaaccaacaaaccaaaaaaccccactaaagatagctgatgagctaaaagaaaaaaaatcgcaaaaaaaaaaaaaaaatctcataatgttttaacaaagtttatgaatttgtgttgggccaaattcgaagccatcctgggccacgtgcagcccgtgggcagcagggtggacaagcttgctttaaatcatctcgagattacttataatacctaatacaatgtaaatgctatgtaaatagtcattatactgtattatttagggaaaaacggggaaaatagtctgtaaatggtctgcgcaggtgcaatttttttttcctgaatattttagatccaaggttggttgaatcctgggtatatggaacatatatatatatatacacacacatatatatacacacatatatatatagagagagagatgctgctcatctatatataatctatgtaaaaaaatttttctttttttttttttttttttgagacggagtctcgctcagtcgcccaggctggagtgcagtggcgcgatctcggctcactgcaagctcctcctcccgggttcacgccattttcctgcctcagactcccaagtagctgggactacaggcgcccgccaccacgcctggctaattttttgtacttttagtagagacgtggtttcaccgtgttagccaggatggtctcgatctcctgacctcgtgatccgcctgcctcaggcctcccaaagtgttgggattacaggcatgagccatcgcgcccggctaaaaaatatttttatatttatttatatttatatatagatggtgcttatatccaaagtctttattctctccttcatgtttcttttttttctttttttttttttgagacggagtctcgctctgtcgcccacgctggagtgcagtggcgcgatcttggctcattgcaagctccgcctcccggtttcacgccattctcctgcctcagcctcccaagtagctgggactacaggcgcccgccaccacacccggctaattttttgtattttcagtagagacggggtttcactgtattagccaggatggtctcgatctcctgacctcttgatccgcctgcctcggcctcccaaagttctgggattacaggcgtgagccaccgcgcctggccttcttcttctttttttttttaaagacagtgtctcactctgtcgcccaggctggagtgcaatggcatgatctcagctcactgcaacctcagccttccaggttcaggcaattctcttgcctcagcttcctgagtagctggaattacagacatgtgccacgacgcccagctaatttttttattttagtagagacaggtttcgccacgttggccaggctggtgccgaactcctggcctcaagtgatcccccctgcctggcctcccaaagcgctgggattacagccgtgagccaccgcgccctgcgccttcatatttttcttaacccttcctttcttctttaattttttcctgtgggggcatgttgacctgagctggggtccacgctgtccgggttctgtgttcatcacatcccctgcccgcacaggacgtgagcctgcacttcgtgctctggggctgcctgcacgtgtaccagcgcatgatcgacaaggcggaggacgtgtgcctgttcgtagcgcagcccggggaactggtggggcagctggcggtgctcactggcgaacctctcatcttcacactgcgagcccaacgcgactgcaccttcctgcggatctccaagtccgacttctatgagtatgacagcccgaagttggagtgtgggtggcactcggaggaccccaacccgtgggagtggccagaaccccatccctcaacctcactcctggaagagcagaagggagcccccagatctggcctcccagcgccggtgtaggacggttttgaggccttcctctttcatcccaagtctgttcctgcaggatcatgcgcgcacagcccagtgtggtgctgagtgcggcgcacacggtggcagccaggatgtcgcccttcgtgcgccagatggacttcgccatcgactggactgcagtggaggcgggacgcgcgctgtacaggtgcagctcccaccgcgctgctcaggcccggcctaggggtggggacctgggggtggtcagaccttgctgacctccacgcccactcaggcagggcgaccgctccgactgcacttacatcgtgctcaatgggcggctgcgtagcgtgatccagcgaggcagtggcaagaaggagctggtgggcgagtacggccgcggcgacctcatcggcgtggtgagcgcgacccccacccactgacctctggccttttccaggccagtccctcgacaactcacacacatcatcccgggtaatccagggagtggtgaatgcagctcccgacctctgaggtcacccagtccactccccgcccagacctcatttcgttggaaaaaggggattccgcctgtcgtggatccctgtcctctccctctccccagagctctaatgggtagcgagcgaggcttgcttccctacacccccattgcaggggagccctagatggggcagtacagccccctttccacccatcttcggcctcctcattccccacccaagcagccccaatcatgcacgcggccccccaggtggaggcactgacccggcagccgcgagccacgacggtgcacgcggtgcgcgacacggagctggccaagcttcccgagggcaccttgggtcacatcaaacgccggtacccgcaggtgcggcctgttgtgggcggggcagagaggcggaggcgggactccgggggggtgggggccgggcctagtgtgtgggcggggcttacagaggggcggggtcgagggaggggccgaagcgagagagtgagggcgggggctctcgggggtgggacccaggtaacgggcacccaggagccccggcataggagggagaggtgggacctggacagccgcttcccaggtctcactgaaatgccggcctccaacgcccccaggtcgtgacccgccttatccacctactgagccagaaaattctagggaatttgcagcagctgcaaggacccttcccaggtgagagccggccggcccagagcgtgctgggagatgtagtccggcgtccagagcatgctgggagggaagccttctttcctgagggatgctgggaaatggagttccgcgaagaaatcgtgcccctgagggtttcaaaccctaagtaggacccaggtgcagagcattctggggaatggagttcgtgttcctgagcatgctgggaaacgaagtcctcgacccctggcgtgctagttaatgggctcgaaagtaaatcagtggtgccggggagggagtcttaggcggtggacttggcgtagtctgcccgggagtcagggcttgctggggaagtccacggcctggacgttgagagaaagggagtcctagatcagaatatgatggcagggccgtcatggtggctcatgcctgtaatctcagcactttgggaggctgaggcaggaggatcgcttgagcccaggagattgagtttgaaaccagcctgggcaacatagtaggacccccgtctctacaaaaatttcaaacattagctgggcttggtgacacatgcctgtagtctcagccactcaggaggctgaggcgggaggattgattgcttgagcccggaggtcgaggctgcagtgagccgtgatcgtgccactgtactccagccgggatgacagagctagaacctgtttcagaaaaaataaaacagcaaacaaacaaaactccccataccatgatggaaaatagtctgtggattgttgtttaggactctgggcacctcgccttctgaagttacagcttgctgggagatgtagccccctgtttcagcctgtggcttcagtgagctagaacagaatggggcgtgcggtggggttggaggcctgctgaaatgagggcctgagtttctacattgtggtggccagattctgggccagcccagcaacctagataccccttttccctccaggggttctacccaattggccctgagccctagatcccccaaggcgggggcagggcggtagtggcagaaaagacatcattaagaaattacagaggcctggggcggtgggtcacgcctgtaatctcagcactttgtgaggctgaggcaggtgaatcacttgaggtcaggggttcgagaccagcctggccaacgtggtgaaactcatctctactaaaagtacaaaaattagtcgggtgtggtggtgggtgcctgtaatcccagctacttggacggctgaggcaggagaatcgcttgaaccggggaggcagaggttgcagtgagccgagcctacgccattgcactccagcctgggcaaccagagcaaaactccatctcaaaaaaaaaaaaagaaagaaaaaaaaaaagaaaagaaaaggaaagaaattacagatagagaatacaatatctagaagacaaaagagggtcatcttgccgtgtggctgaaagagggagggaggaagggagggagaaagaggcttttctaaggacagtgagctgagacttgacaactaagatggggccagacatgaaagagaaaccaggggtgctgcacaggaggctggtggttttgaagcactgaggaggaaagcgatcaaggggagaggtgatgggggttggggggtaagtcacataggggctaggggctgtggacaggcacttgagcttatttagattgttattgttagattggggaggaaggattccaccagtaaggaggcaacaagaggtctaggcaagatatgggagttgacagctggtctaggctgttagtggagaaactgggaagcaacagctgggtcaaaagtagcttttcttttcttgtctttgtcttttcttttattttctttttaagacagggtctcgctctgtagcccaggctggagtgcagtggcacgatctcggctcactgcaacctctgcctcccaggttcaagtgattctcctgcctcagcctcccaagtagctgggattacaggtgtatgccaccatgcctggctaattgttgtgtatttttagtagagcagtgtttctccatgttggctaggctaaaaatagctttatttctgcctcgttttatgttcaggtcccccattagacagaggaaccaaggccagaatgaggcaggggcactggccaattgatctcccaagcacagtgaatctgaatggttgtagagttgtgtaatggatcccactgaggtgatcagggcccaaagtggagggtagatggccaggttttaacaaaagagggaatagtagttgaggctgagggtccaggaccagagccatggctttctgtatggtagagtcaagactttgggcaactgggggctgcagtctgggagcacaggagcaagaatttcagataaggaggaagaggaagaagaggaggaggagggttcatctctctggacacaggttcgcaccacaaatctcatccattgggttcttagcaggctctgggttgggtgtgcccccacactcggaactcaccaacccagccagcaacctggcaactgtggcaatcctgcctgtgtgtgctgaggtccccatggtggccttcacgctggagctgcagcacgccctgcaggccatcggtcagtggggtgagggtcatgggtgggggctggcggtgggtgggacattagtgagtgagagatgttagggtaggtcatttggggggtggaggggaacagggccacaggggcggggtaatgggtattcttttctgagttaggccccagccctgtggaccatggttcccagcctcccttccccacctacccctaggtccgacgctactccttaacagtgacatcatccgggcacgcctgggggcctccgcactggataggtgtgtgttgcagaagggagtggggagggtggtgggtgggcctggagcctcaaattctttcagacctgagttcaagttcttggcttccaaccacggagcctgcgtcttacccataggtcaatggggagattcgcagtggtgtgaatctgcccaccggagcacggacttccgtggtgggggtttgggtgtctaagttcctcccagcaacggagctatgtggtctcggggagcacactgaccccaggccaaccccaggatgacgctgcccccttcccaccctagcatccaagagttccggctgtcagggtggctggcccagcaggaggatgcacaccgtatcgtactctaccagacggacgcctcgctgacgccctggaccgtgcgctgcctgcgacaggccgactgcatcctcattgtgggcctgggggaccaggagcctaccctcggccaggtcggaagcccgtgccccctgatctcacccacctcgggtcccgtcctttgccctcccgtgcctgcaccaggccacgtgcaccctcgccatgggggtaggcgatcagggacccaggtgtggccaggtggtggtggggcggctggtgacctcagccgtccgtattccgcagctggagcagatgctggagaacacggctgtgcgcgcccttaagcagctagtcctgctccaccgagaggagggcgcgggccccacgcgcaccgtggagtggctaaatatgcgcagctggtgctcggggcacctgcacctgcgctgtccgcgccgcctcttttcgcgccgcagccctgccaagctggtgaggagcgggccggcccccaccttctaggggcgtggctggtgggcgaggcttgggagactggggcggggcctgggagggctgaggacaggctcgaaggtcagggtacccctgggggatccgccggaccccgccctcatgctcctgggtcgcgactatctcccccatcccagcatgagctctacgagaaggttttctccaggcgcgcggaccggcacagcgacttctcccgcttggcgagggtgctcacggggaacaccattgcccttgtgctaggcgggggcggggccaggtgagggcggggcttgctctctgggggcggggcctggatgtccgagggtggagcttcctgggagaaaccgtgggggcggggcctgggtgttcgagggtggagcttcccctccgggagagaccccgtgggtaggggcgggtcctttgttccttagcagtgcgggaggtgggaggaggtaggggcaggggagttcctgcaggtggggcctagcgggtcactggggcccattttcccggcaggggctgctcgcacatcggagtactaaaggcattagaggaggcgggggtccccgtggacctggtgggcggcacgtccattggctctttcatcggagcgttgtacgcggaggagcgcagcgccagccgcacgaagcagcgggcccgggagtgggccaaggtgtgtgttgcgaggagggattgctgcaccccaggagtgccataaaacccgtggttccaacctaacctgatcccatgggggagcctccggggtcagggtgacccttcctgattaaatctatgatccccagctgtccggacttttatagataagcttctaggactctgggtaaccactttgggacctcctgtctactgaccctaacccataacccccaacgagagcacccagggcccttggtgaccaccttgtggatggccttggatgaccacatcatccctaagtgttcctttttttttttttttttttttttttttgagactgagtcttgctctgtcgcccaggctggagtgcagtggcacaatctcggctcactgcaacctccacctcccaggttcaagtgatttatccgcctcagcctcatgagtagctgggattacaggcacgccccaccagcccggcaaatttttttgtattttagtagagatggggtttcaccatgttggctaggctgcttttgaactcctggcctcaagtgatctgcccgccttggcctccaaagtgctgggattaccagtgtgagccgctgcacctggcccctaagtgctgcttgctcaccccctattgatgaaccttatctgtgaccccatgtaactcctatttgaccctgtctggccccttgtccctagagcatgacttcggtgctggaacctgtgttggacctcacgtacccagtcacctccatgttcactgggtctgcctttaaccgcagcatccatcgggtcttccaggataagcagattgaggtaggcccacctcatcccctgccctgcctacccctccccggaggagccccctgctcctcccccacctcgatccctgtccccgcaggacctgtggctgccttacttcaacgtgaccacagatatcaccgcctcagccatgcgagtccacaaagatggtgggtgtccccgcccagcctgcagcaaccgctgacgccacgtggggttggggggatgcttccgggagggccgctgagcttctgggacgttgttaacacgagtgaccgtccaccctggcccgatcaccgaccactaaccgccacccactaatgccccggagaccccaggtacgtccgtccttgggggaggggagcagggagactcgtcggacgccttacccccctcacgccatccccgcaggctgtgtgtggcgttacgtccgggccagcgcctcctactgcccctacctgcccccactgtgcgaccccaaggacgggcacctgctggtggacgggtgctacgttaacaacgtcccaggtcagcgagcccatcgggccggctgggcctccggcgtgtctgagcgtgtctgtgcgtgtttgtgtctgtgtgtcccaccgcgcaggctccctgtggcggtacgtgcgcgccagcatgacgctgtcgggctacctgcccccgctgtgcgaccccaaggacgggcacctactcatggatggcggctacatcaacaatctgccaggcaagtggccgcccgcaccacccgcacacgcaagcacctcccgcaccacacacacgcacacgcgtgggcacacacagacaggctcgatgacgggacacatgcccaagctgcccatgcaggggtgcagacacacatgcgcacacatacgatcacttgcacaaaatgatacatgaatgtgcctgtggacagcgacatgtgcagttgagatctacattctggccaggcgcggtggctcagcctggaatcccagcactttgggaggcctgaggtgggtggatcacctgaggtcaggagtttgagacccgcctggccaacatggtgaaaccccgtctctactaaaaatacaaaaaattaaccaggctggtggggtgtgcctgtaatcccagctactcaggaggctgaggcagataaatcacttgaacctgggagttggaggttgcagtgagctgagatcatgctactgcactccagcctgggcgacagagcaagactcagtctcaaaaaaaaaaaaaaagaaagaaagaaatctacatctacctgctggcgtgctgtgttaagcacaagtggatgtacgtacaagagggacaggtgcacacgtccacacacacatcaggggacatgcaggtggaatgcaacactcgtgtgcacaccagctatatatgcacatgctttctctcaggggcaggtagggcttacacacacgtgtacacacaggcacatgtgcacagatgaacacgtgtgtcagtgaaatagggcatttgccaacgcatgccagtctgtcccgtttgtcctgcacgttccctcaaacacgcagggatgtgcacacacgtagataggatgcggcacctctgaccgagttaagtcatgcctaccacctttatgggtgcaggtgagaagcgggcaggtacacaacttaaaatctcacaccccagaagtgtgcatatatgaacagacatgtacgccaactgcacacatgctcacaatcttgtaggccaggggtgggcaaactatggcccacaggctgagtcctgccctctgtttgattgtataaataaagctttattgagctgggcacagtggctcatgcctgtaatcccagcactttgggaggctgaggcgggtggatcacttgaggtcaggaattcgaggccagcctggccaacatggtgaaacccggtttctactaaaaatacaaaaattagctgggcgtggtggtgtatgcctctaatcccagctacttgagaggctgaggcaagagagttgcttgaacccgggaggtggaggttgcatcgagcccagatcgtgccattgcactccagcctgggcgacagagtgagactctgtctcagaaaataaaacaaaacctcccaacacctgacccccctcctcaacttcagttgcatcatttgcacgtctgtgcatgacagcatggtgtttgcatgtgtgggtattctctcttttttttttgcgtgatcatttgcatgatggcatctgtgggactgggttgaacatctctgccccgggcccccgaggggagcagcccgctgacccccctggccccacagcggacatcgcccgcagcatgggtgccaaaacggtcatcgccattgacgtggggagccaggatgagacggacctcagcacctacggggacagcctgtccggctggtggctgctgtggaagcggctgaatccctgggctgacaaggtaaaggttccagacatggctgaaatccagtcccgcctggcctacgtgtcctgtgtgcggcagctagaggttgtcaagtccagctcctactgcgagtacctgcgcccgcccatcgactgcttcaagaccatggactttgggaagttcgaccagatctatgtgagtgggcaggagtggcatggtgcctgcataggtggtccggctaagctttgctacttaaagcccagagtggtatgagggggaggaatccaggaggaatccaggaatcccatctggaatctctggaaaacagatcagtgatcaattggtgatgtctgcaggggatgtagtaggggtgtggctgtgcatgtgctgtgtaagaactttctccttataggccagctgcacccctggaagcactgtatagtgatttctactgccatttctgcattggtgggaatgagaatagtgatgaagcagaaatgtctgccacagttccaggagagggaggtagcagtgcgtgtgttatgtgctactgaccctgaaaaatgtgccatagcccaagccaattgaaattgatcagggggccaggcatggtggctcatgcttgtaatcccagcaccttgggaagctgaggtgggaggattgcttgaaaccaggagttcaagaccagcctgtgcaacatagcaaaaccccatctctacaaagattaaaaataaaaaattagctgggtgtggttgtgcatgcctgtcaccccagctacttagggggctgaggtgggaggaccgctcgagcccaggagtttgaagctgcagtgagctatgattgcgtcactgcactccagcctgggtgacagagcaaaactctgtctctaagaaaaagaaagggccaggcatggtggctcatgcatttaatcccagcattttgggaggccgaggtgggcagatcacttgaagtcaggagttcaagaccagcctggtcaacatggtgaaacctcatctctactaaatatacaaaaattagctgggtgtggtggcacatgcctatagtcccagctacttgagaggctgcagcaggagaaatcgcttgaacctaggaggcagtggttgcagtgagccaagattgtgccactgcactccagcctgggtgacagagtgagactctgtctcaaaaaataatattaattttaaaaattaaagataaaaataataaaaatttttttaaaaagaaagaaattgatcagtagctgcagcccagaagccctgagtctgagaagagatgtgtgatgtcccttgtgggctcactgggatagcatgccatgagaaattcaagatgtttgctgtgggcttggggatggcgacatccacagatgtactgcctgtttgcagacttcaaaataagctcacacatcaccaccttgtgttatttgctacccagcaccctgcatggggctgtgtgggaaagaacatggagagattgattggtaatgtctgtcaagggcaggacaggggatgtgtaggcgagtgtgctatgtgcagctgactctgaaataggtttagtctcaaatgcaactcccccagagaatcaggcttttgaggggccagagaatgggcagacagagtggggacaagcaaagcagggttgcagacatggacccagcccctcatttcccacaggatgtgggctaccagtacgggaaggcggtgtttggaggctggagccgtggcaacgtcattgagaaaatgctcacagaccggcggtctacagaccttaatgagagccgccgtgcagacgtaagcctgtgatgcccccagggccactctgactccactgattacagaacccaagcccccttaaagtctccccgaaacctcagatgaccccacatgtccctgggttttgctgagctctcagacctctgctgacttcagagagttcccaccctaggatctcctctgagcccccaatgcaccactgggccccccaggggccccaagactctgtgggccccccctaagagcctcaccagtgtcaccccacaggtgcttgccttcccaagctctggcttcactgacttggcagagattgtgtcccggattgagccccccacgagctatgtctctgatggctgtgctgacggtgaggggcccaggggaccccccaagagggaggggagtggctggagatggcaggccagccccaatcccctcacctgtgccctgctccccgattccaggagaggagtcagattgtctgacagagtatgaggaggacgccggacccgactgctcgagggatgaaggggggtcccccgagggcgcaagccccagcactgcctccgagatggtgagagtgggtggcccagggtcccctcacatcccccagagggtcatgagtacagtgtcaggcaggggagccgggggcgtatttgagatcctgtgtgtgctgggtgctggctgacatgtgacgcatcagtgtcccgtgctgggtgacgtgtgtgtgaccttccctcgcaggaggaggagaagtcgattctccggcaacgacgctgtctgccccaggagccgcccggctcagccacagatgcctgaggacctcgacaggggtcaccccctccctcccacccctggactgggctgggggtggccccgtgggggtagctcactccccctcctgctgctatgcctgtgacccccgcggcccacacactggactgacctgccctgagcggggatgcagtgttgcactgatgacttgaccagcccctcccccaataaactcgcctcttggaaatggcttcctgtcgttttcggactggggacccaccttctgtgctcaggatggctggggctggggtctgacaccacctggtgcttgccccccacagggaatgcctttctagaatccacacggagccccactaggtgcttgtccccactctgccccttctctggctcctcagaagccagtgctgactccggaccacagggccagacattccgtgccaccctcccgggctcacaggtgctcttgggggcccgatatggcacccctcaatttctttctgtgtgttttttgttttttgtgtttttttttttgagatggagtctcactctgtcacccaggctggaggctggagtgcagtggcatgatctctgctcactgcgacctccatctcccgggttcaagcgattctcctgcctcagcctcctgagtagctgggattacaggcgcccgccaccacacccagctaaattttgtgggggggttttttggttttgttttgttttttgttttaatttttgagacagtgtctctctctgtcacctaggctggagtgcagtgatgcgatctcagcttattgcagcctccagctcttggattcaagtgattctcatgcctcagccttccaagtagctggggccacaggcgagcaccaccatgcctggctaatttttgtattttttgtagagaaggggtttcaccatgttggccagtctggtctcaaactcctggcctcaagccatccacctgcctcagccttccaaagtgctgggaatacaggcatgtgccaccacacctggccttaatttttgtatttttagtagagacggcatttcatcacgttgcccaggctggtctcaaactcctgacctgaagtgatctgcccgccttggcctcccaaagtgttgggattacaggcatgagcctccttgaccggccagaacggtttatcttttttatgagtgaataatatcccattgtgtagatggaccacatggtatttattggttcatctgttggacgcttgagttgcttccaccttttggctatggggagtcatgctgctgtgaacacaggtgtacaactatctggatccctgctttcaacttccttggctagatgcccgggagtggaattgttgggttacatggagattctgtgttgaattgaagaaacgccaaacttttccatagcggctgcaccattttaaattcccaccgactgtcagtgcctcgagctgtcagcaccatggacagggatggtgctgtccgaggtgctactgacgccccctctgtgtctttccctccaagcccccccacccccgccgatatccctgcgccctccagatctctgagttttgagggtggagggggacatttaggggaaagttcagtccatagtttggcacctactggtgtctgtatcttaactggctccccttccatcctggctcacaaggctccagttgtaccagccttcattctattcctcaaattctccatcgattcctggctcaaagcacagaattgggctttttactccctgtgtagctgattaagcctgtcctcaattgtcacctcttcggactgtgtacagtaacttccctgttcccgttggcccctgtctccttgcctttaaagcacttcattagtcacagttgcttcacttgtttttattgttttcattgtttattattactattattattattattattattattattattattattattattattattattttgagacaagatcccactctgtcacccaggctggagtgcggtgatgtgatcacggcttactgcagctttgacctcctgagctcaagtgatcctcccacctcaacctcccgagtaactgggactacaggcgcgagtcaccacatgcagctagtttttttttttttttttttgtagatatgggggtctcaccatattgtccaggctggtctcaaacttctgggctcaagcgatctacctgtcttggcctcccaaagtgatgggattacaggtataaagtgttgttggtgttgttgttttgtttgtttgtttgtttgtttttgagacagagtttcactctgttgcccaggctggagtgcagtggtgtcatctcggctcactgcaacctctgcctcccgggttcaagctattctcctgcctcagcctcccaagtagctgagattacaggcaaccgccaccacacctggctaatttttgtatttttaatagagacggggtttcaccatgttggccaggctggtctctaactcctgacctcaggtaatctgcctgcctcagcctcccaaagtgctgggattacaggtgtgagccaccacacccggcctaaagtttttaattaacttttttttttttagagacaggatctcactctgttgcctaggctggagtgcagtagtgaagtcatagctcactgcagcttcaacctcccaggctcaagtgatgctcccacctcagcctgccaagtagctgggactacaggcaagcaccaccacacctggataatttttaaaaaaaaattttggtagagacaagggtctcgctaggttgtccaggctgttctcaaattccagggttcaattgatccttctgccttggccatccaaagtgctgggattacaggcacgagccatcacatcaggcctcacttgcttacttgtttctcatctgtctctgcaagacacacttaaatataagttccatcactggaagaaccttgcatagaacagcacctggctcatggtaggtgctcagtaaatgtcgaatgacatcaagctccaaagacgaagcaaagatccctgagataactcccactctctctctttctctctgattttgttttgttttattttgagatagggtctggctctgttgcccaccctggagtgcagtggcgccatctcagctcactgcaaccacgcccaggcttaaaccatcctcccacctcatcctccctggtagttgggaccacaggcacatgccaccacacctggcttaatttttgtatttttgatggagacaaggttttgccatattgcccaggctggtcttgaacctgggctcaagcaatccaactgcctcagcctcccagagtgctgggattacaggcgtgagccacctcacccagccgacaatacgtttttgttgctgaagtcaccccatctgtggaactttgtgacagtgaatcctagcaaattaacatagaagcccttggctagactcagctgccatgatgtggatggtgtaatggatcaggcaggacaagtcaggttatgccgctgtaacaaataacaccaaagtcttggggggcaaaaacaatacaaaagtaatttctgagctgggtgcagtggctcatgcctatagtcccagctacttgggaggctgaggcaggaggattgcttgagcccaggagtttgagaccagcctgggaaacatagcaagacctcatctctaaaaaactttttaaaatcagctgagcatagtggcatgcacctgtagtctcggctatttgcgaggtcgaagcaggagaatcgcttgagcccaagaattcgaggctgcagtgagctatgatttcaccactgcactccagcctgggcgacagagtgagactgtctctaaaacaaaagtagtcactatctggaatgttttgggtcactgtgactgaggaaagacatctctggaaggcctcatacccatcattaaatactctggtccagaaatgatgcaatacttttatctcactgctcattggctagaaaaagtcacatggtcctacccaactgtaagtggccaggaaaaaacagccctaccatgtgcccagaagagagagcattggaaatatttggtgatcatcactaatgatcaacaggctgggctgcagtagctcacgcctgtaatccaagcactttgagaggccgaggcgagtggattgcttgagctcagtagttcgacatcagcctgggcaacatggcaaaaccccatctctatcagaaatacaaaaaattagccaggcatggtggtgtgagcccgaaatcccagatcctagggaggctgaggtaggaggatcacttgagccaagggaggtctaggctgcagtgagccatgatcatgccactgcactccagcctgggcaatagggcgagaccctgtctcaaaaaattaaaataaaaacaaacaaaaaacaaactattgactaacagagttggaactgagcctcaactggaccttcctggactctctaggctacccctctctggttccagagcttgagactcagctagcgccaagaaattttgaggttacagtgaggacctgggttcagggtcaggggccctgtcctgcaatccacaggagctggccacgaggtgtggacccaagagactgataaagtcacattctcaagagtgttttcttggtctctctctctctgtctctctctgtctctctctgtctgtctctctgtctctctctccccctctccctctccctctcctctttttctttctttctttgacagagtctctatctgtcacccaggctggagtgcagttgtgtgatctcgccttagcgcaacctccacctcctgggctcaagtgattctcccacctcagcttcctgaatagctgagattataggtgcatgccaccatgcccagctaattttctttttaattcttagtagagatggggttttgccatgttggccaagctgatcttgaactcctgacctcaagaaatctgcctgccttggcctcccaaaatgctgggattacaggcatgagccaccgcacccagcctcttggtgtgtttgttgcccagtgtctggaaatggccatgtagaggttggacagggaagaaccaacctggtcaggctgtaggacatcttttggccacccaggccaagtgcagtggctcatacttgtaatcccaacactttgggaggccaaagcaggaggatcgcttgaggccaggggttcaagaccagcctgggtgacatagtgagactctgactctatgaaaaatattaaaagtagctgagtgtgagggtgggcttctgtagtcccagctacttgggaagctgaagttagaagatcgcttgagcccaggagttagaggctgcagtgagctataattgcaccactgcactccagcctgggcaacagagtaaaaccttttataaaaataatattaataataagtttaggccaggcacagtggctcatgcctgtaatctcagtactttgggaggccaaggcaggtaggtcacttgatgccaggagttggagaccagcctggccaacatggtgaaaccccttctctactaaaaatacaaaatagctggatgtggtggtgcgtgcctgtaatcccagcttcttgcgaggctgaggcacgagaattgcttgaacctgggaggcagagattacaatgagccgagatcatgccactacgctccagcctgggtgacagaataagcctctatctcaaaaaataaataaacaaattaaaaaaaataagaggctgggcatggcggctcacacctgtaatcccagcactttgggaggctaaggcaggaggattgcttgagcccaggagtttgaggctgcagtgatctattatcacaccactacactccagcctgggtgacagagcaagaccctatctctgaaacaaaaataataacaaaaaaagcaaaaaacagggaattttcctttccttctttattgccagaaaggaaaaaaaaaatcagggtcctacatttgcacagattggcaggttctgcccattgctagccagctgaccttgggcttcccttcccccattctcaaatttgtcacctgtgtattctacctaattttagtcccagtgggttgctttgtaatttatctttatttttatttttttgagatggagttttgttcttgttgcccaggcttgagtgcaatggcatgatcttggctcaccacaacctccgtctcagctcaccgcaacctctgcctctggagttaaagcgattctcctgcctcagcctcccgagtagcagggattgcaggcatgtgccgccacacttggctaattttgtatttttagtagagacagggtttctacatgttggtgaggctggtcttgaactcccgacctcagacgatcttcccactttggcctcccaaactgctgggattacaggcgtgagccaccatgcccgacctgtgatctaaataaaaggaaacaggctgggcgtggtggctcacacctgtaatcccagcactttggggggccaaagtgggaggatcgcttgacgtcaggagttcgaaaccagcctgggtaacatagtgagacccccccccccgtctctaataaagaataatacattaataaaataaaataggccaggcacggtggctcacgcctgtaatcccagcacttcgagaggccaagacgggtgggatcacctgaggtcaggagttcgagaccagcctggccaacatggtgaaaccccgtctttactaaaaatacaaaaattagctgggcgtggagacgcacgcctgtaatcccagctactcaggaggctgaggcaggagaatcgctcgaacccaggaggcagaggttgcagtgagctaagatcgtgccactgcgctccagcctgggcgacagagcaggacaccgtctcaaaaaaattaataataaaataaaactaagataaaacaaaacagagctccttgcaggaggaaactgacgcacacacctacctggaccagattcttacttttctgccaccagggggcggtcctgctatggcgttcaggcgtctggctccggggtggagctttgctgactaggggagggttaagcaccgagtagctgtgggctgacttactgctttttttttttttttttttgtcgtttagaattaacatttattggaaaggaggggaggggagggagtactgttctcattataaaatcattacctgtgtgcttcagccaggtgcagtggctcatgcctgtaatcccagcactttgggaggctgaggcaggtggatcacttgaggtcaggagttcgagaccagcctggacaagaagatgaaaccccgtatctactaaaaatacaaaaaatttagccgggcgtggtggtggtcgcctgtaatcccagctactcgggaggctgaggcaggagaatcacttgaacccaggaggtggaggttgcagtgatctgagatcacaccactgcactccagcctgggcaacagagtgagactccatctcaaacaaacaaacccacaaacaaattattacttgtgtgcttagaacaaatttataaaacaaatgcaacataaacataaaggtaatatgtgttcatttggaaatatatgttcatggaaagcagagtgtaaaaaaagaaaaggtcacaggaattccaccgcctggatgtgaacactgctaatactcccttcttttttcccaatttccttccttttgttttgttttgttctgttttgttttttgagatgaagtctcactctgtcgcccaggctggtgtgcagtggtttgatctcggctcactgcaacctccgcctcccgggttcaagcgattctcctgtctcagtctcctgagtagctgggattacaggcataagccaccatgcccagctaatttttgtatttttagtagagatggggtttcaccatgttggccagctggtcttgaactcctgacctcaggtgatctgcccaccttagcctcccaaagcaatgggattacaggcgtgagccccagtgcctggcccagagtcagttttttattctgcaatcaatttaaatgtcctagatttgcttttattgcaagtcagtgccttgaaagaaaagatgagagcgtttgatgacatgaaaacatgcttaacaaagacagaagacaaacaaagccaatagcctggaaggaaatatttgtcacataaattaggcagatgatcgagctttgttcatgtttattgaacacttactattatatataccagccattgtttggggggggttgtatttatcaaataacttaatttttagccctttgatataggtagtattattatttccttttttatctttttggtgtttttgttggtgttcttgctgtttttgagaatgggtaccgctctgtcgcccaggctggagtgctattgggcaatcatatctcacagcagcctcgacctcctgggctcaagcaatcctcccacctcagcctccccagtagctgagactacaggcccctgtcaccacacctgactaatttgttttattttttcaaagtgagatggcggaggcgggtggggggtctcactttgttgcccaggccggcctcgaactcctgggctccagcgatcctcctgcctcagcttcccaaagtgctgggattacaggtgtgagccaccatgcccggccagttttcacttcttaatttggcaaatgctaaaaatattaacacatccagtcacactgaaagttgggtgaataagaaacatcttcacagtgttaggctgggaaactgtcaattatggagattttagggggaagggaatttgactgtcatcatgcaacaaatttttttttttttttttttgagacggagtctcgctctgtcgcccaggctggagtgcagtggcgtgatctcggctcactgcaagctccgcctcctgggttcatgcccttctcctgcctcagcctcccaaggagctgggactacaggcgcccgccgccacgcccggctaattttttgtattttgagtagagacggggtttcaccatgttaaccaggatggtctcgatctcctgaccttgtgatccgcccgccttggcctcccagtaaacaacaaatataaagcgcataacttttgacctagccgggtttcgtccaacaatcaatcctctataaacgcatgcgtctaaagatgtgtgttcctcacagcgcttttctgcaatgatgccgttgcttataaaagtgaaaattggaaaacagtctcagtgactgacaacagaggcatagtttaataaattagggcacagtaccttacgggaatgctctgaagccattaacaagaatgaaacagacttatagctattgacataaaaaaaattcctaggtactctgctccacggataaaaagagtcatagaacattgtgtacagtatgatcacatttacgtccaagaccgtccatgacacacaggtttgtacatgcacgggatgccctgggaggatagttccttgggaagaaatatcagggtgggaatttaagggggagaatttcaatatttttacttttctactgtttgacactttaacaatgagattgcattattgtgataatttttaaatttatttgataatttttaaagcccccagaaatgatcctgttttgaaattgttaaatatttctttttgttttacttatttatttattttcgagacagggtctcatcccatcacccaggctgtagtgcagtggcactgtctcagctcactgcagcctctgcctcctgggttcaagtgatcctcccacctcagcctcccaagtagctgggactacagggcatgtaccaccatgcctagctaatttttttatttttagtagaggtgaggtctccctatgttgcccaggatcgtctcaaactccttggctcaagcaatctgcctgccttggcctttcgaagtgctaggattacgggcatgagccaccttgcctggctctttttaaattttattattttttattttacaaaagtagagacagggtctcactgttctgcccaggctggtgttgaactcctgggctcaagtggctggcccacctccacctcccagagtgttgggatcacgggcttgagccatcgcacctggcctaaatatttctttaaaatgacagaaagccgggcatggtggctcactcctgtaatcccagcactctgggaggccgaggcaggcggattacctgaggtcaggagttccagaccagcctggtcaacatggcaaaaccccatctctactaaaaatacaaaaattagtcccagctacttgggaggctgaggcaggagaatcgcttgaacccgggaggtggaagttgcagtgagtcgacatcgcactactgcactccagcctggacgacagagcaagactctgtctcaaaaaacaataacaaaaacaaaacagaaaataaaacataacagaagacaggcagagcaacagtctgggaggaaatatttgtcacatcaattaggcagaatatcaagcattgttcatgtttattgaacacttattgtataccagccactgttttgaggcgggggggggttatggttatatttatcaagtaacttaatcctgtgatcatggttgtttctgacatttcagtgttatgaatgaaaccgggatgaatatctttttttttttttttgagatggagtttcactcttattgctggagtgtaaaggcacgatctcagctcactgcaacctccatctcccgggttcaagcaattctcctgcctcagcctcctgagtagctgggattacaggcatgcgccaccacgcctggtaaattttgtatttttagtagagacagggtttctccatgttggccaggctggctcgagctcccaacctcaggtgatccacccgccttggcctcccaaagtgctgggattacaggcatgagccacggcgcccggcgaggggatgaatatgtacgaatcttcacgtgcatctgtgaggatatctttatgttatctctaatttttgtgtttggtttatttcagagttgggatctcactatgttgcccaggctggtcttaaactggacgattctccggcctcagtctctcaaagcgctgggattactgacaagccactgccccagtcctgcttagttttctttacattacaaagcaaacttttgtgtcagggactaaaatcaggtagaatacaaagatggtaaaacagtctgggagagcttaaacccgaggccatctagctggcaagcggcagaacttgccactctgtgcacgttcaagtccctgttcttttgtttgtttcttgttttttttttagagacaggttctctctctgtcgcccagctgggagggagtgcacaggcatgatcatagctcagtgcagtctccacctcctaggctcaatcgatcctcccacctctgcctcccaagtaggtgggactagaggcatgcgacaccatgcctagctcatttttaattttttttttataaagacggagtcacggctgggcacagcagctcatgtctctaatcccagaactttgggaggctgaaaccagcagatcacgaggtcaggagttcaagaccagcctggccaacatagtgaaaccccgtcctactaaaaattcaaaaattagccaggagtggtggcaggtgcctgtaattccagctactcaggaatgctgaggcaggagaatcacttgaactctggaggcagcggttgcagtgagctgagatcatgccactgcactccagcctggggcaacagagtgagacttagtcctaaaaaaaaaaaaaaaaaaaaaaaaaaaaagccaggcatggtgactcacacctataatcctagccctttgggaggctgaggtgggtggatcacctgaggttgggagttcgggaccagcctggccaacatggagaaaccctgtctgtactaaaaatacaaaaattagatgggcgtgatggcgcatgcctgtaatcccatttactcaggaggctgaggcaggagaatcgcttgaacccaggaggtggaggttgtgataagctgagatggcgccactgaactccagcctggtcaacaagagccaaactccatctcaaaaaaaaaaaaagatattgatttttaaatttttcaattcccaattattcattgttatcgtgtagaaatacagtttagttttatatatagaccttgtattctacaacttcactaaatcacttactggatctagtaggttttttgtacattcattctgattttttgtgtagatgatgttttatttttctttcttttcatatatgttcgctatcatctttctcttctttccaagtctgtgtgctttttatttcatttcctaccttattgcactgtctgggacttccaatacaatactgaatagaggtagtaagaacagacatccttggccaggcatggtggctcacgcctgtaatctcagcactttgggaggccaaggtgggcggatcacctgaggtcaggagttcgagaccggcctggccaacaatgcggaaccccgtctctactaaaaatacaaaaattagctgggtgtggtggcatgtgcctgtaatcccagctacttggcagcctgagttgggagaatcgtttgaacctggaaggcagaggttgcagtgagatgagatcgtgccactgcactccagcctgagggacaaagcaacaacaccctgtctcaaaaaacaaaacaaaaaccaggctgggcgcggtggctctcgcctgtaatcccagcactttgggaggccgaggtgggcagatcacgaggtcaggagatcgagatcatcctggccaacatggtgaaaccccgtctcaactaaaatacaaaaaaaaaaaaaagaagccaggcaaggtggcacgcgcctgtaatcccagctactcaggaggctcaggcaggggaattgcttgaacctgggaggcagaggttgcagtgagctgagatcgcgccactgcactccagcatggcgacagagagactgtctcaaaaaaaaaacaaaacaaaacaaaactggacatccttaccttgtttccaatcttaggataaaacattgagtcttactattaagtatgatattagccatgtttcatgtatttctttgtttaatctcttaatttggcaattccattgattgattttattttattttatttatttttttgagacaaggtctccctcttatcccccaggctggagtgcactggcgcgatctcagctcactgcaacctccgcctcccgggttcaagcgattctcctgccttggtcccccgagtagctgggattgcaggtgcctgccaccacacgcagctaatttttttatttttagttgagacggggtttcaccatgttggccaggctggtctcgaactcctgacctcaggtgatccacctgcctcagcctcctaaagtgctgggattacaggcatgagccatcacacccggccactttttttttttttttttaaacagagtctctctctgagccaccttgcccagtcccattgattgattttcaaatgccgaacccaccttgtatccctcggacaaattccacttgatcaggacatgttttcctctttatatactcctggactcaatttgctaatattttgtgatggattgtttgtatcgatgttcctgaagaatattggtctgtacttttctttccgggcatggtggcaggtgcctgcaatcccagctactcaggaggctgaggcaggagaatcgcttgaaccagggaggtggaggtttgcagtgagccaaggttgtgccattgcactccagcctgggtgacaagagcaagactccatctcaaaataaaataaaggcgtagtggttttgcattttgaggaacttgtctatgtcaggtaaattgtcaaatttattgccacagagttgttcataaaatttcctcattatccttttaatgtccatagggactgtagtgatatcccctcttttacctcagtgtgcaaatgcttttcaagcctctgcttctctcacattttctattgtcccattggccaaaataagtcatatggccaaaccctgagtcagcatgggaggggactccccaagggcgtggatacgagcagatgtgaacaaaccgggaattattacttctacaatccaccacacgaagtccctccctgtggtaagtttctgcccctaagggacagatttgttcacattagttgcttggtgatttattcatatatatttatttatatatttattaatatgtatttatttatatatttattaatatatatttatttatatatttattaatatatatttaacaaatacattaataaatatatgttaatatatttattataaataagtttatagaaatatatatatatggccaggccaggcgcagtaactcacacttgtaatccgagcacgttgggaggccgaggtgggtagatcaattgaggttaggagttcgagaccagcctgaccaacatggagaaagcccgtccctactaaaaatacaaaagtagtcaggcgtggtgtcgcatgcctgtaatctcaggtactcgggaggctgaggcacgagaatagcctgaacccgggaggcggaggttgcagtgagccaagattgcgccattgcactccagcctgggcaacaagagcgaaactccgtctcaaaaaaaaaaaaaaaaaattagctgggcatggcagtgggcacctgtaatcccagctacttgggaggctcagccaggagaattgcttgaacctgggaagcagaggttgcggtgagccaagatcgcaccactgcactccagcctgggtgacacagcgagactctgtctcaaaatgaaataaaataaaataagtaataaaataataaactctatgacgactgcaagtcacttcacaccttgaaaatgatgtttacatctaggatatatatatagacaaggtctcactgttttccaggctggcgtgcagtggcgtgatcacggctcactggagcctcaaactcttgggctcaaaacatcctcctgcctcagcctcctaagtagctacagaggtgctccaccacaccctgctaattttttaaatcttttgtagagatgtgggtctccctttgttgcccaggttggtctccaattcctgggctcaagcgatcctcccgctttggcctcccaaagtgctgggattacaggcataagccactgcacccagccttaggatacataacttagtagagaagttgagaagtgaggagagcatactgaaaggtaagtcagggtgatgggggctcagaaagtaccagaagggccaggaaacagattccacaaacatcaattgagtatttactgtatgcatgaatctgctaaaggaataactgtgtggtcaacagagctggaaaatatggcttttctcaataatgagctccctgttcacagaaagaatcaaggataggctgaattttgtgagctccggggaaaggtttggactagcagatgtttaaggctctgttcttttggaatagtctataattccacaacagggatagtgtttgggggaaagatagaaggtggacaagaaacagaaaatgaggacactggctgggcgtggtggctcacgcctgtaatcccagcactttgggaggccgaggcgggtggatcacctgaggtcaggagttcgagaccagcctggccaacatggtggccaacgtggtgaaaccccatctctactaaaaatacaagaattagctgggcattgtggtgggtgcctataatcccagctacttgggaggctaaggcaggagaatcgcttaaacccgggaggtggaggtttcagtgagctgagatcacgccactgcactccagcctgggtgacagagtgagactctgtcagaaagaaagaaggaaagaaggaaaaaaagagaggagaaagaaagaaggaaggaaggaaggaaagaaggaaagaaagaaagaaaggaaggaaggaaaggaaggaaggaaggaaggaaggaaggaaggaaggggaaggaaggagaagggaagggaagaaaggaaggaaggaaggaagagagagaaagaaagaaggaaagaaagaaagaaaaagaaagaaagaaagaaaaagaaagaaaaggaaagaaaagaaaagaaagaaaggcaggccaataggccaggtgtggtggctcacgcctgtaactccagcactttgggaggccaaggtgggtggatcacttgaagccaggagtttcataccagcctggccaacatggtgaaaccctatttttactaaaaaaattaaaaaaattaagttacccgggcatggtggtggctaacacttgtagtcccagctacttgggaggcagaggcaggagaatggcttgaacctgggaggcagaggtggcagtgagccgagatcgtgccactgtactccagcctgggtgactgaggaaaactccgactcaacaaaacaagacaaaaaaccaacaaaaaagaggacaccgaaggaggaaggatgggagtgcaggagagaaccgcttgggagaggagagaggaaagggatgctggataggcagaccccaaagtttgcgcttagcccgggagggttcttggcttcaccgaggaaataattcaagggtgagctggtggtgtaagttttactgaagtgacagcagtagcagaggttctgctcctggcagagcagggctgccccataggcagggagcccagaatagcagctgagaggcagtgctgcagtgagacttatacctacttttaattgcatgcaaaggaaggggcagattatgcagaaatttctagaaaagggtggtaacttctgggtgactgccatggaaacgggtggtaagttctgcgtgttgctatggcaatggtaaactgacatggcacactggagggcatgtcttagggagaggtgctttcacctgttccccgtttcagctagtgttttttgtttgtttgcttttgggggacggaggctcactctgctgcccaggctggagtgcagtggtgtgatcttggctcactgcagcctctgactcccaggtcagcctcccaagtagctgggattacaggtgcccaccaccacgcccatattttcagtagagatggggttacctcatcttggccaggctggttttgaactcctgacctcaggggatccaccagcctcagcctcccaaagtgcggggattacaggcatgagccaccgtgcccaggctgtttcagctagccttcagtctggtccaggctcttagccccatctcgggagtccagtcctgcttcctacctcaaaaggagtgatgtggccaccaggtgcggtggctcacacctgtaatctcagcactttgggaggctgaggcaagtggatcaccagaagtcaggagtttgagaccagcctggccaacatggtgaaaccctatcgctactaaaaatacaaaaattagctgggcgtggtggcgggtgtctgtaatcgcagctactttggagactgaggcacgagaatcacttgaatccaggaggcagaggttgtagtgagccaagatcgcaccactgcactccagcctagatgacagagcaagattctgtctcaaaaaataaaacaattaaaaaaaaagaatggatggtgggtgatgatgcagagaggtttaggaggggaggttttaggtaaaacctccctcactgactcctctcactgacttcttcatcggacaccctctttcctgccttcccacacacataccgctaagactgtcttccccgaggtcactataggacgccgtgtcccgagatccaatgcaaccacccacttcttatctcacacagcctccaggccagcccaagacactggagactactcccaccttcccaaagcctttgttcccttgttagtttgatttcctccctccctggaagctcagagcctcctctttctcctccatcccctcccagggccacatcctcaacccatgtctcacattccatggagcttcatttatatcactggcacacctgtattcccaatctatgtttgttggtttgttttgagtcagagtcttgctctgtcccccaggctggagtgcaatggcaccatctcggctcactgcaacctctgcctcctgggttcaagcgagtctcctgcctcagcctcctgagtagctgggattataggtgtgtaccacttttttgtattttattttattttattttttcgagacagggtctcactctgtctcccaggctcgggtgcaatggcatgatctcgcctcactgcaacctccacccacctcccaggttcaagtgattctcctgtctcagcctcctgagtagctgggattacaggcatgcaccactatgcccagctaatgtttgtatttcagtagagacgggatctcaccatgttggccaggccagtcttgaactcctggcctcaagtgatccacccgccttggcctcccaaagtgctgggattacatgtgtgagccaccacacccagccttgtattcctactcttgaccatgacttggagggtctggatctgcagagcccagaaactcctgcaccgtgtagtcttggtacacggaggtatcatgaaaccccaaagtttgtatgtgatttgctttttcctgtgtatctgcatggttgataaggacaagaagataccacagtttcagaggatgatacagacattcatttgtgttgggctcctgttggcttcaccaatatcaaaaaagcttccagctgggcgtggtggctcatgcctgtaatgccagcattttgggaggccatggcagactgttagtttgagcccaggagtttgagaccagcctggacaacataatgagaccccatctttttttttttttttgagacagagtctcgctctgtcacccaggctggagtacagtggcgcaatctcagctcactgcaaactctgcctcccagattcaagcgattttcctgcctcagcctcctgagtagctgggactacaggcgcctgccaccacgcccggctaatgttttgtatttttagtagagatggggtttcactgtgttagcctggatggtcttgatctcctgacctcgtgatctgcctgccccggcctcccaaagtgctgggattacaggcttgagccaccgcgcccggccgagatcctatctttaaaaaacaacttagccgggcatggtggcacccacctgtggtctcagcaacttgggaggctgaggtgggaggatcgcttgagcttgtaaggtcgaggctgcagtgagctatgatcgtgtcactgcactccagcctgcgaaacagaaaccctgtctcaaaaagaaaagaaaagagcagctggagcccccttatctctgcacgtctcccccactctcaatcaccttggtctttttttttttttaatctaccaaagtcactttctcgcctctgtctgcccaaacacctccttctaccagagggagggaaaggaagtttcttcctatcaaggacatataaatgacggagagcacacttgaaataatgtctctcccttgacctacatcagtagtgagcatctgcatgaatgtattgatgtgtgtgtgcacgtgcgcagatgttcgcgttaatgcatgcaattctgtgggtattactggttacctttgtaaatatttgagtatgtatttgtggatattatctatattttattttattttatttattttgacacagagtctcgctctgtcaccctggctggagtgcaatggcgaaatctcagctcactgcaacctccgcctcctgggttcaagcgattctcctgcctcagccttccaagtagctgggattactggcgcgcgccaccatgctgggctaattttttgtatttttagtagagacgggatttcaccatgttgggcaggctggtctcaagctcctgacctcaggtgatccgcccaccttggtctcccaaagtgctgggattacaggcgtgagccactgcgcccggcccaccattatagtgtcatacagagtagtttcgttgccctaaacatcctctgcattccacctactcatctgtcctccctcttaacccttagtaaccactgaggttttactatcttcatagttttgccttttccagaatgtcgtggagttggagaagtacacaataagtggccctttcagactgtgtttttcacttagccatatgcacctaagtttctttgatgtcgtttcacagcttcagagctttttttttttttcgagaaggagtcttgctctgtcacccaggcgggagtgcagtgacatgatcttggctcactgcaacttccacctcccaggttcaagtgattctcgtgcctcagcctcctgagtagctgagattacaggcaagcgccaccacgcccagctaatttttgtttgtttttgtttttgaggcagagtctcgctctgtcgcccaggctggagtgcagtggcacgatctttgctcactgcaagctccacctccccgattcacgccattctcctgcctcagcctcccgagtagctgggactacaggcgcccgccaccacgcctggctaatttttttttttttttgtatttttaatagagatggggttttaccatgttggccagggtggtcttgaactccaggcctcaagtgatccacccaccttggcctcccaaagtcctgggattacacacatgagccaccgcgccggccttttttgctttttgtttcaaagagcgatagggtcttgctgtgtcacccaggctggaatgcggtggtgtgatcatagctcactcctctcactcttttggggatcttgtgtattggtggaggtgcctgggcccgctctcatcatcatgtggtaaagatgacaaatttctggcctccttggtggccctccgggatgtgaaactcaacctgtccaagacgaaactcatcctccccacccagcctggcccctcatctcctgtccccatctcagcatgcagcaccaccatctacctgcttgcgaaaggcagagatctgggcatcttccaagactccgccctccctctcctggccgcctgttcccatccaccagcaagccctgccaattccatctcccaacacattctgcacccgtgcgtgctccccggccccaaagccacaccctggggctgacctcgttactgaagcctctgtggtctacctgaaattgtcttggcaacaccgggtcccctaagggcaacctgaagctcacagatgtgcatgggtttttctggaccgagctttcaggtttgattttgtcatccgtatgtacgcagttttctttctttctttctttctttctttctttctttctttctttctttctttctttctttctttctttctttctttctttctttctttctttctttctatttttttttttttgagacagagtcttgctctgtcacccaggctgcaatgtagtggcacaatcacagctcgctgcagcctccgcctcccgggttcaagcgattctcctgcctcagcctcctgagtaactgggattacaggtgtgcaccaccatgcccagcttacttttttctatattcttggtagagatggggtttcaccatgttggccaggctggtcttgaactcttgacctcaagtgatccgcctgcctcggccccccaaggggctgggattacaggagtaagccactgagcccaacctgttcatggtttttaaggggacgatgattcctcctgctgggggacatttggcaatgtctggagacattttgggttgtcacaactggagggggctgctagtggcatctggtaggtagagaccaagggtgctgctaaacttcatgcaatgcacaggatggcccccacagcaaagagttatccaaatattctacatctcaatagtgccgtgatcaagaaaacctgtacttgtactacccgaagtgtgagctgcagactgcagctggtccccaagctgttgatttcccatttagatgagagagtccagaaaaaaaaagctttcagaatctttatttttatttatgttttttgagacggagtctcactctgccgcccaggctggagtgctgtggcataatcttggctcactgcaacctccgcctcccaggttcaagagattctcctgcctcagtctctggaatagcttgcaccaccatgcctggctaatttttgtatttttagtagagacagggtttcaccatgttgcccaggctggtttcaaactcctgacctcaggtgatctccctgcctcggcctcccaaagtgctggggttacaggcatgagccaccgcaccctggccagcttttagaacctttaaaggctgggtacagtggctcatgcatgtgatcccaggactttgggaggccgaggcaggaggatcgttggagcccaggagttctagtgcagcctggcaacatagcgagaccccatctctgcaaaataaaaaataaattagccagatgtggtggcacatgcttgtggtcccagctgcttggaaggctgaggtgggaggattgcttgagcctgggaggtccaggctgcagcaaaccatgatcacaccactgcactccagcctgggtgacagagtgaagcactccagcctgggtgacagagtgaaaccctctctcaataaataaataaatagaatcattatagtaatttcacacagtaattttatgacagctgggctcatgttctgcatgccttttaaattccttcctgtattaatagaattttttatttttttattttcattttcttttttttttttttttttgagatggagtttcgctctcgttgcccaggctggagtgcaatggcgctatctcggctcaccacaacctccgcctcccaggttcaagaaattctcctgcctcagcctccagagtagctgggattacaggcatgcgccaccacgcccggctaactttgtatttttattagagacgggcgtttctccacgttggtcaggctggtgtcaaactctcgaactcaggtgatctgcccgccttggcctccaaaagtgctgggattacaggtgtgagccaccgcgcccggccttttattttcattttcttggagacaaggtctcactctgttgcccaggatggagtgcagtggtgcgatcacagctcactgcagcctccaactcctgggctcaagtgaccctctcacctcagcctcctgagtggctgggactacaggcttgtgccaccatacccagctaatagactttttaaagaacagtgttaaattttcagaaaaatcaagtagatggtacagagagtttgagtacactcattctcccccaacacatacacaatacaatttccccttttattaacatcttacactggtatggcacatttgatacaatcaatgaaccaatttttttttttttttaagtcagagtctcgctctgctgcccacactggagaggagggggtgcgatctcagctcactgcaatctccgcctcccaggaatgaaccaatatggatacatttttagtaactaaagtccattcttcattcagtttcttcagctttcccttaatgccctgtttctgtcccaggatcccatgcaggatttcacatttatttatttgagacagagtctcactctgtcacccaacctggagtgcaatggcgtgatcttggctccctgcaacctccacctcccaggttcaagcaattctccagccttagcctctcagttcctgagaaactgtcccagttgaatggaaggagaagtgatgactaaatgtcatgtgaggccgggtgtggtggctcacgcctgtaatcccagcactttggtaggtggagatgggcggatcacctgaggtcaggagttcgagaccagcctggccaacatggtgaaaccccgtctctactaaaaagacaaaaattagccaggcttggtggtgtgtgcctgtaatcccagctactcaggaggctgaggcaggagaatcacttgaacccaagatgcagaggttgcagtgagcccagatctcgccacagcactgcagcctgggtgacagaatgagactttgtctcaaaaaaaaaaaaatagccaggtgtggtggcacccacctgtagtcccacctactcaggaggctgaggtgggaggattgcttgagcctaggaggtggaggctgcagtgagctgtgatcgcaccactgcactccagtctgggcaacacagcaagactgtgtctcaaaataaataaataaataaaagtacatactaacaacataatttctgactgtcaaggttgtctttgactgtctgctggagtagtgtgttaggtttctccactgtaaagttattcttttttttcctctttcctccttccatactgtgatctttggaaggaaggcaccccgtgtagcttacacctaaggattggagagttacgttccactccttgagggcagagcatctacatgaattatttgaaattcttctgcaggggaagaagtccctcatcccctattatgaaattatgtgctccttttttttttttttttttttttttgttgcccaggctgcagtgcacttatgcaaacacggctcactgcagccccaacctcccactcttaagcaatcctcccacctcagcctcctgaatagctgggattacaggtgtgcactgccacacccagctaatttctttaatttgttttatttttagtagagatggagtttcgctatgttgtaaaggctggtctggaactgctggcctcaagcgatcctcccgccttggcctctcaaactgctgggattacagacgtgagccaccatgcctggcctgctcatttcttgacatcagcatggactcacaaatattcattttatatttcggattataatcatccgacgtcattttttttttttttttgacagggtctctctctgtcacccaggctggagtacagtggtgcaatcatagctaactgcagtctcaaactcctgggctcaagggatcctcccgccttagcctcccaagcagctgggaccacaggcatgcaccgccatacctggctaatttttaaatgttttatttttcagcctgggcaacatggtgaaactccatctctactaaaaatacaaaaacttagccgggcatggtggcacgcacctgcactcccagctaatcaggagtctgaggcacgagaatcatgtgaacacaggaggtggaggttacaatgagttgagatcttgtcaccacacttcagcctgggtaacagagtgagacttcacctcaaaataaataaatacataaatacataaataaaaatttaaaaaaaaagaatggggccgtgtgtggtggcttacacctgtaatcccagcactttgggaggctgaggcgggcggatcacctgaggtcatgagttcaagaccagcctggccaaaatgttgaaaccccatttctactaaaaatacaaaaattagccaggcatggtggcgtgcgcctgcactcccaactactcgggaggttgaggcacgagaattgcttgaacatgggaggcagaggttgcagtcagctgagattgtgccactgcactccagcctgggtgacagagtgagactccatctcaaaaaaaaaaaaaatgaagaagtggtgctttaccagggagagtctgggcagcaaaacaccctccggcgtctcctggcattgctcctggctgcactccagggacagtgcccttccttgagcaccagcttggtccttccccagggcctttgtccttgccagttgctctgcccagaatgctcttctcccatctgcttcttttcatcgccccattccctgccctacctctccctcctcctcgaagaagcttgcccagacaactgccctagcaaaagcagctcccaccctgactgtcactagctcctttgctagactgtgtgattgtcccaatattttatccctaggtgaaatgatctttttcttttcttttttttttttttttgagacggagtctcgctctttcgcccaggctggagtccagtggcacgaacttggctcactgcaacctccgcttcccaggttcaagtgattctcttgcctcagcctcccaagtagctgggactacaggcgcgtgctaccacacctggctaatttttttgtattttcagtagagatggggtttcaccatgttagccaggatggtttccatctcctgaccttgtgatccacccgcctcggcctcccaaagtgctgggattataggcatgagccaccgcgcctggccatgaaatgatttctttcactcgtattagtctattgcatctaaatgcaactgtcatgaggcgcaaggacagggatggcctttggcatgcacaatatttgttttttgttttgttttgtttgttttttgagacggagtctcgctctgtgccccaggctggagtgcggtgcgcgatctcagcaaactgcaacctccgcctcctgggttcaagaaattctcctgcctcagcctcccaagtggctgggactacaggtgtacaccaccacgcctggctaatttttgtattttattttattttattttactgagacggagtctcgctctgttgcccaggctggggtgcaatggcatgatcttggctcactgcaacctccgcctcctgggttcaagcgatttccagctaatttttgtcttttaagtagagacgaggtttcagcaagttggccaggctggtcttgaactcctgatctcaagtgatccgtccacctcgacctcccaaagtggctaggattacaggcgtgagctagcacgcccagcctaatttttgtattttagtagagacagggtttcaccatgatggccaggctggtcatgaactcctgacctcaagtaatccgcttgcctcagcctcccagagtgctgggattacaggtgtgagccaccgtgcccagaatgttggttttttgttttgtttttgtttttgagataggatcttgctctgttgcccaggctggagttcagtggcatgatcacaactcgcgtcactgcaacctccacctcccaggctcaagggatgctcctgcctcagcctcccaagtagctggaactacaggttcaagccaccatacccagctaattttttgtattgtttacagaaatggggtttttccatgttgcccaggttggtctcgcactgctgggctcaagtgatctaccgcctcggcctcccaaagtgctgggactacaagcatgcaccaccccgcccggctaatttttgtattttgtgtgtgtgtgtggagacaggatctcactgtgtggcccaggttgttgtcaaactcctgggctcaagcaatctgcccacctcagcctcccaaagtgccgagattacaggcgtgtgccaccatgcccagtcaatattgttcttaaaaattattttgaggctgggcatggtggctgggcatggtggctcacacctgtaatccaggcactttgggaagccgaggtggaaggatcgcttgaggccaggtgtttgaaactagcctgggcaacatagccagacccatctctacaaaatattttttaaattagcagggtgtggtggtgcacacctgtagtcctagctactcaggaggctgagacaggaggatcgcttgagcccacgagttccagcctacagcgaactatgattgcgccactgcactccagcctgggcatcagagcgataccctatttctacaaatatatatataacatatatacatatatagcatataatatttacatatatataacataatatttacagatatatatatacacacacactatatataaataattcttttgaaatattttggacatgtccccctgaggtacctggggagtgctgataataaactccatactggccaggcacggtggctcacgcctgtaatcccagcactttgggaggccgaggtgggcgaatcactttaggtcaggacttcgagaccagcttggccaacatagtgacaccccatctctactaaaaatacaaaaattagccgggcgaggtggcaggtgcctgtaatcccagctactccggaggtggcacgatctcagctcactgcaacctccgcctaccaggctcaagtcatcttcctgccttagcctcccgagtagctgggattacaggtgcccagcaccacacccagttaatttttgtatttttagtggagagggggtttcgccatgttgcccacgctgctcttgaactcctgacctcaagtgatccacccgcctcagcctcccaaagtactgggattacaggcatgcgccactgtgcccgtcctgaaggtcatagacattgagagaagggtgaaccagcctcatactggaagggctgcaaagtggctcagctggtggaccctagatccggtgacttggggctcaaagcctccttctattctccttggtgtatgactcagtttttccatctgtaaaatgggtacaatcctcattatgctggtgttggcgtgaggattaatgagacgatgtcgggcatataacactctcagaaattgtcatctatgagtctgatccctgaagtgcacacacaggtagaattttgcagatgattttatggggtttcacatactcccccaaaccaaatcctgaactcctgacctataaaccctctaagtcatccccacccccagcttaataaccaggctctgtctaatgagttaggaggtgtaagagcccaaagagctccaggtgtgggaggaggcgggaggctggaggggggctcggggaggggctgccccatgcacacagggcagccagtgtgtctgaggctgcctaggccgtaggaacaggcccccaggggcaggtgggatcttgattccagcctgcagtgtgtgggtggggcagtctagaccagccaggctttccagtccgcccagtgtgggggttgggccagtggaggcccctggaggcagggacaggagcacttgacctgcaccaacacctctggacctggacggccccccacccatccttcccaaactgcagccccctcccgggatgggaagctgaacccgtgtatccaccccacatctccccggattgtgtgtgagcatgctgcatttgctgcctttgctgggtttgtccttggggtccacggaggtcatgggaaccatcccaggaaaagcaaacccacgtgtgagccggcaggacacgccaagctcacagaggggcaggttatggcagaagcaccctttcctgctggaaatgcttccccgggccaggaaccccaggtctccagatggggaaactgaggtccagtggggaaaagaccttgtttaggtccttcgaggggactgggacaggagccggggcatgcgtcatccacatcagcacctgtgctcacacacacagacactggcccctttgcgcacccacacccactcctgcacgggcacatccagacaggagggcccacgccccagctcccctccctcggcacacccacccccatgcctgctcacatgctccggaccatgagacccacgccccaaacacacgtgccatttcaacaaagagctagctctggggccaccatccggggtcaagggtcttggagaccaccttgccacagcgtctttccatttcatagcgttttgtttttgtttttttttatgagacggagtttttttgctctcattgcccaggctggagtgcaatggtgcgattttggctcaccgcaacctccacctcccaggttcaagcgattctcctgcctcagcctcctgaatagctgggattacaggcatgcgacaccatgcctggctaattttgtgtttttagtagagatggggtttctcaatgttggtcaggttggtcttgaactccagacctcaggtgatctgcccaccttggcctcccaaagtgttggaatttatttatttatttatttatttatttttttttttgagacggagtttcgctcttgttgcccaggctggagtgcagtggtgcaatctcagctcaccgcaatctctgccttctggtttcaagcaattctcctgcctcagccccccaagtagctgggattacaggcatgcaccaccacctctggctaattttttttttatttttagtagagatgggtttctccatgttggtcaggctggtcttgaactccggacctcaggtgatccgcccacctcagcctcccaaggtgctgggattacaggcgtgagccactgggcccggtcttttttttttttttttctttttgagatggagtcctgctctttcgcccaggctaaagtgcagtggcacgatctcagctcactgcaacctctgcctcctgggttcaagcaattcttctgcctcagcctcctgagtagctgggatcacaggcgccagccaccacacacagggaatttttgtatttttagtagagatggggtttcacaatgttggccaggctggtctcgaattcctgacctcaggtgatgcacctgcctcagcctcccaaagtgctgggattacaggagtgagccactgtgcccggcctgtatgttatctttttacgtatcactttctgagtgcatttgtgtgcatgaagctgacatttacatttgtgtgaatttgtgaatatttgtgtgagtctgtgagcacttattcctgttcacaaggtgacaaggtgcctatgtatgtgtgtgtgtgtgtgtgtgttctgaaagtaacacacgtttttcttttcttttttttttttttttgagacagagtctggctctgtcacccaggctggagtgcagtggcaagatctcagctcacttcaacctctgcctcctgggttcaagcgcttctcctgcctcagcctcccaagtagctgggattacaggcatgtgccaccatgcctggctaatttttgtatttttagtagagacagggtttcaccatgttggtcaggctggtcttgaactcctgacttcaagtgatccacctgcctcggcctcccaaagtgctgggattacaggcttcagccaccgtgcctggccgaaagtaacacacttttctttccaggcctgtaaagaacgaactcacacaaacacttgtgcattcacaattatatacagctaagaggcatgcaggggatattttgacaaaaatacaatggagggccaagcacagtggcacatgcctgtaatcccagcactttgggaggccgaggtgggaggatcccttgagcctaggagtttgagatcagcctgggcaatataaggagatcccatctctacacaaaacaaaaaattagccagggatggtggctgcagtgagccatgattgtgccactgcactcaagcctggggtgacagagtgagatcctgtccaaaaaaaaaataaaacaacaacaacaaaacaaacaatagaacaaaagcaaatattaaaatattaaaaacatccggctgggcgcggtggctcatgcctgtaatcccagcactttgggaggccgaggcgggtggatcacctgaggtcaggagatcaagaccatcctgactaacacaatgaaaccccgtctctactaaaaatacaaaatattagctgggcatggtggccggcgcctgtagttccagctactggggaggctaaggcaggagaatggcgcgaacccgggaggcggagcttgcagtgagctaagattgcaccactgcactccagcctgggtgacagagcgagactcggtctcaaaaaaaaaaaaaaaaacaaacagaaaaaaaaaaaccaaaaatccacaaatcggtgcttagaccttacaaataaacacacaattgcactcatgtacacaaatatttgtactcaacgcgttcacacacacttccatacttacagacacaatcagattcatacacagaaatacatttgcttacacagatatgaattcctagataaatatgcacatttgaactctcacaaaagcattcagacacaggcattcttttttttttttttaatgtgacggagtctcactctgtcgcccatgctggagtacagtggtgcaatcctagcttgctgcaacctctgcctcctgggttcaagcgattctcctgcctcagcctcccaagtagctgcaattataggtgtgggcaaccacgcccggctaacttttgtatttttagtagagatggggtttcaccatgttggccaggctggttttgaactcctgacctcaggtgatccacccgcctcagcctcccaaagcactgggattacaggcatgagccactgcacccagcagaaacaggcattcttgcacaggtatacctgctttcatgcctacacaatctgtcacaggcacccaccatatattcaaatccacaaagatactcacatataaacacacatatatgcacaaaaatatagtcaggaactgctcatcataaatcacacatctgctgggcgcggtgcctcaagcctgtaatcccagcacttcaggaggccgagttgggcggatcacgaggtcaggagatcgagaccatcctggctaacatggtgaaacccggtctctacttaaaaaaaaatacaaaaaaccagccgggcgtggtggcgggtgcctgtagtcccagctactcgggaggctgaggcaggagaatggcatgaacccaggaggcagagcttgcagtgagccaagatcgcaccactgcactccagcctgagcgatagagcgagactccgtctcaaaaaatcaatcaatcaatcaatcacacatccatgtgcatatagccagattcacatactcaaatacaaacccacttagacacacagcctcacctccacacagagccttctcccagcacacactgcagataccagaataatacacaaagacacttgcaaatacacccagtacagctacgcaaggacactcatagacacaaatagtcacactcttgcagaaatatacacactttttttttttttttgagacagggtctcactctgttggccaagctggagtgcagtggcactatctcagcttctgcctccctggttcaagcgattctcccgcctcagcctcccgagtacttgggattacaggcatgcaccattatgcccggctaatttttaaaaattttatttttagtagagacggggttttgctatgttggccaggctactcttgaactcctggcctcaagtgatctgcccgccttggcctcccaaagtgctgggattacactcgtggccaccgctctcggcctgaaatacacacactctcaatgtctctccatactcctgcattgacagaggcatcaataacagcctcatacaacacaccagtacgttcagatgcacagagatagacatactcacagcactccaaaaacacacacacagccgggcacggtggctgccgcctgtaatcccagcactttgggaggctgaggcgggtgatcacctgaggtcaggagtttgagactagcctggctaacatggtgaaaccccaactctactaaaaatacaaaaattagccgggagtggtggcgcaaccccgtaatcccagctactcgggaggctgaggcaggagaatcgcttgagcctgggaggcggaggttgcagtgagtcgagatcgcgccactgcactccagcctgggagacagagtgagtgagaccctgtctcaaaaacaaaaacaaaaacaaaaacaaaaaacagacacacactcatcacttccatccatcctcaggatacagacatctatataatacatatccttgtacacacaacaaattaaacacacacttacacgtgcccagatacataccccacacacacacacccctagacaccccccaatacacttggtcaccacccaaatgtattcagagatacacagatacgaagacactcatattcttgtgccttcactaacataatcagaaacaggtgcacccaaccactctctgcctgagggccggcgtttattgcaagcacttgcaggagctcctacgcctaagggtagacactggggctggcacacacagagggtccctaatcctttccagtaagctaggcgcgcgcgcacacactcacacacgcgcgcgcgcacacatacacactcagtcctccgcaagctccctccaccatcgccgcagtccaggccgcccccctccgccccgcccctgctgctccgtgcacactgcagtgaggggcccgggcggggcgcaggggcgcgccagggtccgggtccgggttcgggggcggggcgcacctgggctcctccccggggcgggcccgacgcagcgtcgccagcgcaagcggccgcacctggctcagcagcggcggcggcggcggcggcggcagcggcggtagcagcagcgggcccggctggggcgcgagcgcggcgcagcccagcccagcccagtccgagcgcggacccggcgcccgcagccccggcgccgccatggtggaggcggcgccccccgggcccgggccgctgcggaggacctttctagtgcccgagatcaagtcgctggaccagtacgatttctcgcgggccaaggcggcggccagcctggcgtgggtgctgcgggccgcgttcgggggcgcaggtaccggggctcgggggaccggggtcgggggcggcgggccgggcgcggcaggtgctgggggggggcggggcgccgggccgggaaggcagggggccgtgggaacaatagcgccggccgccgggggtccccgggctcgggcccctgccgcgccggggcctccgagcttcctgctcggcccgggcggtggactttgccccgccggctgcgggagcgcggtgggggtggggcccgcggcccagctccgcgcgggggtccccggcgtccaagcctccaggtgagccgggcggggtctgcgggccgggtggggtctccccgtgcggacctctcgttcccgcctcccgcacccccaaggccttcccttgcacgccttcttctcttttacacacatcacgcccctgcgaggatctcctctcggtctcttcccccgccacacaccctggagacccagaccccgacctcgctggggggtctcgagcgctccggtctccaccaccgcacgacccccaggccccaacacacaccccgcgtcggccctggccgcgctgcgggcggcgaccggggagctctgggaaccccctttcgcctccatagccccctccagcgcctggcagctgcgacttatggccccattttactggggaggttggcgagcccagctgaagggaaatgggtagtacaagatcgcctggggtgggccccccgctcctcccggctgcggggccttctcccattagagcagatccttcactccctcccccaggcccgcttgcctgagagcccgagccaccctaatggggaggatgccgtaatcccgggtccccgggattagaggccctggaaacactcagtctcggctttgggcagcttcacaaccccaggccagagctaggagtcagggcctggccagagaagacaggggttaattaaggtctgggctttccagcggggagctgtgggggtacatccttttctcccactggttctgcccactggtgttggcacagcccatcccccctctccctggccttcccagatcaacctgttctgggtgtgggtctcagtgacagctgtccgtctcctggttccgccccagcctgtccctctttctcccagacagtctctgtctgcgtcgttccatgcatgcatttcccactctggggtctacctccctgcagatatttgcttgaggaagaaagagattgggcattggacagccaggacagccccagctcctcacttccaaggttaccaggctgtagagaactcaacgtggagtgtcagaattgaatgtgaagtccagctgcaccagaatgcgaattatcccaattatctgagcttctgtttccccttctataaaagaaggcgttcattcacagacttatctgttttgcgaatgtttgtggggcaggggcacttgctatgtgtagggcactgctccagtgatggagaccccccgttacctctttgcaaggttgctgggaggcgtaaaagctgtagtgaccacagaattcttcgcgtggcacggggcgcgtgatacatgcgaaacggttgctcgctgctggtgtgattggcggtggtatattttgatgaataatattaacgttatccattatcccctggccaggaatcagagtagaaattatcccattttgaagacagcaaagcaaacttctgatgaggggtgttggtgagctcccagtgccctgactcacccagttctgttcttgttgacccagctccctctgctgtgtgacacacggcagtggctgcctctaccgtgagggtcaagttcaatctgttccctgttccactcccctaaaaagaggagaagggctgaaggaaatgggagcagagttctacaagattcatgagctctggggactcttgacggtatgatacctatcaggtgctgggctgggcgctcagggtgtagaggagacggcaggggatggatatggggcagagggggatgggcaggaaaccagatcatagggaagctggccagcggggcctggggaaagaaattcttgaaatcttccagggagggaagagatcccacaggtggaaagatttgagtctggaaggatgcatggaagtttgacacggagaagagatgtgtgggcagtgggcaaaggctcggagtgtggaccagcagggagttctcagagaataagatgcaggtccccggggtggcggtgggagataagggaggctggtcagactgaggaaggcccttcaggcccctggttatggatccaagggtactggggagccacggacagtgttgggaactgacaagatcaggtatgcagtggccccgtgggagtagtgatggctcagaggaagggatagttctggcaactccaaggcacaggtgtgagaaggctgtgcagaaataaaagcagaacacaagcttggagattagataagaaagggttccaagcctggccaacacgatgaatccccgtctctactaaaaatccaaaaattagccgggaatgatggcacacgtctgtagtcccagctacttgggaggctgaggcaggagaattgttgaacctgtgaggcggaggttgcagtgagccgagattgcaccactgcactccagcctgggtgaaagagagagactctgtctcaaaaaacaaagggttccatgttaaacacatttggaaaacaccccatgcagttctttatgccttcagaacagatgtgtgatgtgtgagggaaactcaagttcatgttggacatttttatcctggacaagttatctcagctctccaggccttggttttctcatctgtacaaggggtataataataagtgtcgtaaggattaaatgactggatgcagggaaggtcatggtataaataaatggttgggtgtggtggcatgggcttgtagtcccagctactcaggaggctgaggcaggaggattgcctgagcccaggagttccagggtacagtcagctatgatcacgccactgcactccagcctgggcaacagagtgagatcctgtctcaatcagccttccatccatccatccacccatccatctacccactcatccatccatccacccacccattcattcatccatccatccacccacccacctacccactgcactcatccatccacccacccaccccactcatccatccacccaccccactcatccatccacccacgcactcatccatccacccatccatccacccactcatccatccatccacccatccatccacccattcattcatccatccatccatccacccacctacccactgcactcatccatccacccacccacccacccaccccactcatccatccacccacgcactcatccatccacccatccatccacccactcatccatccttccacccacccattcattcatccatccatccatccatccatccatccatccacccacccacctactcaccgcactcatccatccacccaccccactcatccatccacccacccacccaccccactcatccatccacccaccccactcatccatccacccacgcactcatccacccacacactcatccatccacccaccccactcatccatccaaccacgcactcatccatccacccactcatccacccgcccatccatccacccgcccatccatccacccacccacccacccatccacccacccacctacccacccacacactctcccacccacccatccacctatccacccatccatccacccacccatccacccatccatccatccacccacccaccaactcatccacctacccacccacccactcatccacccacccacccatccacccatccatccacccgcccactcatccatccacccgcccactcatccatccacccgcccactcatccatccacccgcccatccatccatccacccacccatccatccacctacccacactcccacccagccatccacccacccaccctcccacccatccacccacccaccctcccacccatccacccacccacccatctacccatccgtccgtccatccacccacccacccatctatccttccacccacccacccacccactcatccatccacccatccacccacccactcatccatccacccacccacccactctcccaccctcgcacccacccaccaactcatccacccacccacccactcatccacccacccacccatccacccatccgtccacccgcccactcatccatgcacccgccgactcatccatccacccgcccatccatccatccacccacccacccaccccctcatccatccacccaccctcccaccgtcccacccatccacctatccacccatccacccacccactcgtctacccatccatccatccacccacccaccccccatccatccacccacacacccacccactcatccatccaccaacccacccactcatccactcatccatccacccacccacttatccatccacccacccactcatccactcatccatccacccacccactcatccatccacccacccatccacccacccttccatccacccatccatccacccacccacccatcctcccacccttccacccacccacccatccacttatccacccatccacccacccacccatctacccatccatctatctgtccatccacctacccattcatccatccatccatccacccacccattcatccatttatccatccatccatccatccacccacccattcatccatttatccatccatccatccattcacccacccattcatccatttatccatccatccatccatccatcctagctatgttgtagacctgtgctattcaatatggtggccaccagccagatgtggctactgagtcacttgaaatgtggttgatcagaaccaagatgtgctgtaaatgtaaaatatactcagggttccaaagacttggtccaaaaacaaacaacaaaaaccagtgtaaaatatcttatgaataatatttttatgttgattacatgttaaaataagagtgggatatgtcttgggtcaatgaaatatattactaaattcttattgtttctacatatgtaatgtggcttctaggaaacttgacggctcattgggctcacattatacgcattatatttcttttttttttctttttgagacagcatcttgctctgtggcccaggctggagtgccggggcacaatctcggctcaccacagcctccgtctcctgggttcaagtgattctcgtgcctcagcctcctgagtagctgggattacagacatgcgccaccacgcccagctaatttttgtatttttagtagaggtggggtttcaccatgttggccagtctgggcacattgtatttctatcagacagcagtgttctgctgtaaataatgctcagtaaacattttagccaggtgtggtagcacatgcctgtagtcccagctactcaggaggctgaggtgggagggtcccttgaactcaggagttcaagaccagcctgagcaacatagtgagaccccatctctaaaataaaataaaataaaataaaataaaataaaataaaataaatgaataaataaaataaaaagaaagtggggccaggtgtggtggctcatgcctgtaatcccagcactttgggaggctaaggtgggtgggttgcttgaggtcagggtttgagaccagcctggtcaacgtggtgaaaccccatctctactaaaaatacaaaaagtagccgggcatggtggtgcacgcctgtagtcccagctacttgggaggctgaagcaggagaatagcttgaacttgggaagcagaggtcgcagtgagccgagatggcaccactgcactccagcctgggtgacagagcaagattgtctcaaaaaaaaaaggaaagaaaaatagaataagtttatagtataaggcagtggttctcaactggtgatgattttgacacttaattgacatttggcagtgtctggggacatttgtggttgtcattacttgggaggaatgtactactgacgtctagtaaatacagaccagagattttgctaaacatctcacagtgtacaggacaggacagcatcccctgaatacaaagaattttccagccccaagtaccaatgaaccaaggtggaagaacatcggtgtataataagtgtctgataaatgtcagtgtagccctagcttaaggttttggtgttttttgtttcttgtttttcatcttaaaggccctgaaaagtcctgtaggaaagaaacacgtgtgattttgctggtgggagcaagacgtgcccaaggccggggctggggaggtagagaggagggtttggatttgggagatatcaggaagttgaaagccaaggacgcattaaatgtggggtgagggcgtaaagaaagggagggagggtgatttctcactgccttgggggcagggaggaggggaggtgtgggtgagatgttgagaattgtgggagatgcccagggtgcagtggggcccgtggcagccgctgttgcagtcttcaggtggccctggaagccgtcacggggtagggtggcctggggtgggggtggggcatgtccatttacaaggagacgcctgtgggaggaaggtttctggaagaaggaggcactgggcacagagcccaggcgagatacgggcccacagatatgctttggaggtccctgctggccttggggagaccggaagccatgagggcagcatcgagctcagggaaattgagggagaggtggaggggggctgggagggcagggaggaagtgagcctgaaatacctcttctttcaaggagccaagatgagaggggcaaaaagaaggtccaagtctacatgcgggtggcgcgttaagtgggacggtccagtgtggttttagaaggtgggaaaggagccaggacagggagggacagaaggcagccaagagtgcctgggtcctcacaggtggagaagtcccgttcaaatatgttctgaagcactagaaccccttaccctgttctttcttttctttttttttctttctttcttttttttttttttaagacagaggcttgctctatcacccaggctggagtgcagtggcgcaatctcagctggctgcaacctctgcctcccagatttaagcgattctccggcctcggcttcccgagtagctgggattataggcgtgtgccaccatgcccagctcatttttgtatttttagtagagatggggtttcaccatgttgacaaggctggtcttgaactcctgaccttaaaagatctgcctaccttgttttcccaaagtgctgggattacaggcatgagtcactgcacccggcccccaccccgttctttcaaacacacacacagaaccccaatatacaaaacaagtctgggcacagtggcttacccctataatcccagcactttgggaagccaaggcaggtggatcacttgaggccaggaaattcgaaaccagcctgagcaacatggtgaggcttccatctttataaaaaaatttaaaaattggctgggtgtggtggcacgtgcctgcggtcccagctactcaggaggctgaggcagggaggatcccttgagcccagagttcaggttgcagtgagccatgatcgtgccactgcactccagcaaaaactcaaacaaacagagaaggctgtgcaggctgggcgtggtggctcacgcctgtaatcccagcactttgggaggccaaggtgagcagatcgcttgaggtcaggagttcaagaccagcctggccaaaatggtgataaccctgtttctacaacatacaaaaattagccgggtatggcagcatcgcacctgtaatcccagctacttgggagtctgaggcaggagaatcattcgagcccgggaggcagaggttgcagtgagccaagattgcaccactgccctccagcctgggcgacagagagactcttatctccaaaaaaccgcaaaagctgtgcagattagaacaagagctggacagattccctgctgttgatttcagtcacctcttccccgacccctgccaagccttcctggccttctcctctccactcttggtcctacgtggatttctgcccccagcccactgtccacctggggcttcctcacgcctcttcccattgtcctatttagggacctcaggctgtctctatgatgtgacctcaccatctctctaagccccagcctttcacataatctgcctcaaggatgtcctcaaagcccctcacattcaatttcaccccttcacctcccattcctcctgcacccaagctcagtcattacccctctcttccctcttccccctcagacccagcaaggtcctggctacctccctctctgtcccttgcctcctcccttcaatcaccaggtttacatcactcaactccctcgatgtgcctgtggtgtgcccacctcccctgctcgcctgtgtgccccccactcatccccccctgcctgcaagctaagagagggcgtccagtttgctgggtctaaccccagtcctggtgttgaagagttatttggcctggggcaagggactttccttctctgtgcctcagtttcctcctctgtaacatgggggttgccaattgggccctggctgcctcctagcgttgatgtaaggctcagtgagtctacattggcaagagcaggaaggctcttaggattgccgatgttattgtctttcctgggacctacaagagccagtccagctggcctggtattgggggtagcctcccctcctttccactctaagtgcccatcagctccctgaggcaccgtgttctctcccacctgctgggctttgcatctgcaggcccctctgcctacaacgccatcaccccttcctccagcaaactcctgcacatctgcactctcagcccagatcccctttctcctttcccaatgccatcctccctggtccagacacactcttaatccgggccatgtggtgtgtgtgtgtgtgtgtgtgtgtgtgtgttgtatctggtgaccctgacccccgtgtttcccctctatgcccccacagagcacgtgcccccggagctgtgggagcccttctataccgaccagtacgcgcaggagcatgtgaagcccccggtgacacggctgctgctctcagccgagctctactgcagagcctggcgccaggcactgccacagcttgaaacaccccccaacccctctgcactgctggccctgctggcgcggaggggcacagtgcctgctttgcccgagcgcccggtgcgcgaggccgacctgaggcaccagcccattctcatggtaggccccgccactgcctgttagaccacgcctaccatgctcagctcctcccctcaagctcctcccgccagtcctggctcctcccaagttccctctatcagtcttggctcctttcaagctttgtcgattaagcctagctcctcccatcaggcttggctcctcccccaggttcctcccaccaggcctggctcctcccctcaagcgctattaagcctagttcctcccacgaggtctggctcctcccctcaagcgctatccattaagcctagctcctatcagtcttggctccttcccttaagctatgtccatcaaacctagctcctcctatcatcagtcttggctctgtcccttaagctctgtccatcaaacctagctcctcccaccagtccaggctcctcccctcaagctctgttcattaagcctagctcttccccccagccctggctcctcccctcaagctcttcccatcaagcctggcccctcccatcaaacccagctccccaaaaaggcgctactctggcccttgaggatttgtgtacacagcccaccctatcctaacgcctagcatctgacctcaaagtcccacccatcgtgcgtggcttttccgggaccccatttcttgttccttcccttaaggccccacccatgaaccactggccccgccccctcaagccccaccccccccgtcaagtccctcccatctgcaggttcttccttttcccaggcccttgggggccgaggtgcgcctcctgcagctctcaggtctcaccctctagcgcttgcccccacagggagcccacctagctgtcattgatgccctcatggctgcctttgccttcgagtggacaaagaccctgccaggtcccttggccctgaccagcttggagcacaagctgcttttctgggtggacacggtaggtggggttgggcctggggtgggttcggggaccagcatcgtccagtggccagaccactgaccccctccctgccctccagaccgtccggcggctgcaggagaagaccgagcaggaagcggcccagcgagcctctccagcagcccctgcagacggggcggccccggcgcagccctcggtgaggccagggcatagaaccgtcagaaggatgggggaccggagatctgggagggcagggctgtgcttcctggacactcctgaagtggggagggggctagaggtgacacactctctctttcttcccccctctctcaatctctctgtgccctgcccgtcccctgtgccggtacccgctgccctcctctctgcctctctggcctcagtgccctacgcgctggtactggaagctggttcctgtaagtggggctgtctgtccgccccgtctgcctgccctgcttgtagctctgtctgtctgtatgtctgtttctgcctgcctgtctgcgcgccctctcatacctccccaagctgtgagcaaaggaggttggaccccagtcctgggagacagggagaacccctctgtgaaccaagagaagggtagaatctcggccattaactgagagggcagacccctcccccagcgaactgatgggtggggacgaacttcccctcccgttattcagaagggcaagccctccccgttcccattaatgaagagggtgggaccccctgaacctgtcccccttagccgaggtggggagaccacataaatttctgaaggggggacctgcagcccatcacaaacgtggatcctgaccctagcaggcagggcaccctctggccaaggggaagaccctccaatgcagaagaagatagaataactttcctaactgagacccccagcttccctagagaaaaatcccagctttgaaaaggaggaggaggcccatccctgaagctggaagttgaaatttctctcttccctgaatgagctgtgtgaccttgcagaagtatctaaacctctctgtgcttcatataaattactcccatagtagataaacaaggaggaagtgggggaggttttgggctggctggcgtccccacctttgctcactccttcccccaccctggggcctgggttgggaggttcccttcctgcctacccgcttcctctgcatcctctccccaagctgggggcctgggtcttttgtgggaggaggattccccgcataagagggggttcctactctgtggggtcccttggggctgggaggagctggggttcgcgaagccggccagagcagtcagggagctggacggccggggctcaggaccagggtcagggctaccccctcccccccaaggtgggcttgggggcccagcaggtcagcacccctcccccttgctgatggctgctcctctccccccagcacgcaattgccttctgtttgaaggagtcggggagcaaaccccccatggtaatgtatcccccgccccggggtcccaggagtccctgtccccagcccccgctgctggcctggctgctcgaagacatctcctctgcctcttgctgctgcccctcccctgctccaggctggccccccaactctgtctctgggacccccagcttcccgccccctcatggcggaaaccccaggcctccctgcccagcctgcatgaccgctgaccctgggggccagcctggccactcacctgacctggctcccatctgcagatccgataccgcaaggaccgtgtggtggcgcgacgtgccccctgcttcccgacggtgaccagcctccaggacctggccagtggggccgcgctggccgccaccatccactgctattgtccccagctgcttcgacttgagggtgagtaaatggatgtggaacagatcttgtgccggggagctgggcatcctaagtcccagcccctagaccctccatccccaggtccgcgagaccagcaacgatgcagtggtcatgagggcagcttccggaactggcaggcctgagtttgtgtctctctcttccccaatgagctttgtgacctcacacaagtatataaacctctctgtgcttccaggagttcattcctgcagcagatgaaacgtatggagtgtggactgtgtgccagaccttgttttaggcactggggatccagccagaatagagacacactccccacttcacagacggctctagctgggagagaaagatactaagtttatccaaaagtacttttttttttttttttttgagacgggagtcttgctctgttgcccaggctggagtgtaatggcatgatctcggctcactgcaacctccacctcccaggttcaagccattctcctgcctcagcctcctgagtagctgggactacagccacacgccaccacgcctggctaatttttgtatttttagtagagacgggtttcaccgtgttggccaggctggtgtcgaattcctgacctcaagtgatctgcctaccttggcctccctaagtgctgggattgcaagtgtgaaccactgcacccggcccagaagtactttttgcatactgggtagtcctaaaggcaatgggtggtcagaaaaagctttttttaaaaaaactcttttttcttttttattaaaaaaaaaattatagggctgggtgtggtggctcacgcctgtaatcccagcagtttgggaggccgaggcgggtggatcacgaggtcacgagttcaagaccagcctggccaggatggtgaaaccgtctctactaaaaatacagaaattagccgggtgcggtggcgggcgcctgtaatcccagctacacaggaggctgaggcaggagaatcgcttgaacccaggaagtggaggttgcagtgagtcaagaccatgccattgcactctagcctgggcaacagagcgagactccatctcaaaaaaaaaaaaaaaaaagtataaaatagagatggggtcttgctatgttgcccaagctggtcttgaatccctgggctcaaacatcctcccacctcagcctccccaagtgctaagattacaggtgtgagccaccacacctggcccggaaaagctttttgagctgaggtcttgggggagagtgttctagaaagatgcaaaggcctaaggcaatagtcaccaactttttggctccagggaccggttttgtggaagacaatttttccacagatggaggcagggaggtggtcttgggataattcaagcacgttaatctttattatgtactttatatctaatacgttgtaacatagaatgaaataattctacaactcatcatcatggggaaccagtgggagccctgagcttgttcctgcaactagacggtcccagctgggggtgatgagagacagtgacagatcatcaggcattcgattttcataaggagggtgcaacctagatccctcacacgccaggttcacaatagggttcgcgctcctgtaagaatcgaatgccgccgctgatctgacggaagcggggttcgggtggtcctgcaagtgacggggagcggctgtaaatacactcactgcagctcacctgctgtacggttcagttcctgacaggccacgccccgggggttaaggacccccggcctaaggacggtctatcatataattcacctcggccgggtacagtggctcacgcctgtaatcccagcactttgggtggctgaggcggccggatcatgaagtcaggagatcgagaccatcctggctaacacggtgaaaccccatctctactaaaaccacaaaaaattagcctggtgttgtggcacactcctgtaatcccagctactcaggaggctgaggtgggagaatcacttgaacccgggaggcagaggttgcagtgagctgggattgcgccactgcactacagcctgggtgacagagcgagactccatctcaaaaaaaaaaaaaaaagaattcacctctcgaagggcacctggcagaagctgggctcataggaggtcttccgtgtgtgggggactgctggtccctggcttccctggggccccatcctcctcctcatagagttggggacccactcctcctgtccccacagaggtgtgcttgaaggaccccatgtctgtggcggacagcctgtacaacctccagctcgtgcaggatttctgtgcctctcgccttcctcgtggctgccccctgtcccttgaggacttgctgtacgtcccaccgccactcaaggtaaggccatcctggggcctcctgggccgaggcgggcatctggggccaggggtcccgtctgctgacccggcctcccacctccaggtcaacttggtggtgatgctggccgagttgttcatgtgttttgaggtgctcaagcccgactttgtgcaagtgaaggacttgcccgatggtcacggtgaggccctgggggcctgggggccgggtcgggggcgggtgggagagccaaacccccgcctgaccctcttctctgtactgcagctgcctccccccggggcactgaggcctccccacctcagaacaacagcggcagtaggtacgctccccacactgggcgagtctctggcattgtgggtgtggggctccatgtctgccttgctgagcactgggacgcagctgggtgatgctgttgtctccccccggggagaggcggaggaggaggtgggggtcctgaggctgaagtacgtctctccgtacagttctcctgtcttcaccttccgccacccgcttctgtcatctggtggcccccagtccccactccgaggatccacaggtgaggagggggtaggtggcttctgtcacgggggacccccccactcacagactgccccagtgggcctcatgttgtctcctcgtgagccttccaatagcctctccatcagatcccccttgggcatcccaaagtgacccccagaatggcctccccagtggccccacagtaccccgtagtgacagtaaatggccccgggtatctgtttctggaaacctctggtctcactagaccacataatgagccatcagtgactcacccaatgaccttgcagaggttgtccccagatgctggctgaccccactcagggttcccagggtccccatagtgaccactcatcgcctcccccaggctccctgaagtcttccccgtccatgtcccatatggaggccctgggcaaggcctggaaccggcagctcaggtgagtagacctcacaggccagggtagggggtggagcaggctagggcgggttggggccgaggctggtcccaggggctgacccctccctccggccgcccagccgtcccctctcccaggctgtgtcattcagcaccccctttggcctggacagcgacgtggatgtcgtcatgggagaccctgtgctcctccgctctgtgagctcggacagcctgggccccccgcgtcccgcgccggccaggacccccacccagccacccccggagcctggtgacctgcccaccatcgaggaagctctgcagatcatccacagtgccgagccccggctcctcccagatggggcggccgacggcagcttctacctccactcccctgaggggccctccaagccatccctggcctccccctacctgcccgaggggacctccaaaccactgtccgacaggcccaccaaagcaccagtgtacatgccacaccccgagaccccctcgaaaccatctccctgtctggtgggggaggcatcgaaaccgccagccccatccgaggggtccccgaaggcggtggcttcgtccccagcagccaccaactccgaggtgaaaatgaccagctttgcagaacgcaagaaacagctggtgaaggcagaggctgaggccggagcggggtcccccacgtccactccggccccgccggaggccctgagctcggagatgagtgagctcagcgcccggctggaggagaaacgcagagccatcgaggctcagaagcgacggattgaggccatattcgccaagcaccgccagcggctgggcaaaagcgccttcctgcaggtgcagccgcgggaagcctctggggaggcggaagcagaggcggaggaggccgattccggtccagtccctggtggggagcggcccgcaggcgagggccagggtgagccaacctcacggcccaaggcagtgaccttctcgccagacctgggcccggtgccccacgaggggctgggggaatacaatcgagcggtcagcaagctgagtgccgccttgagctcgctgcagcgggacatgcagaggctcacggaccagcagcagcggctcctggccccgcccgaggcccccggatccgccccaccacctgctgcgtgggtcatccctggccccacgacggggcccaaagctgcatcccccagccccgcccggcgagtcccggccacccggcgcagccctgggcccgggcccagccagtcaccccgcagcccgaaacacacgcggccagcggagctgcggctggcacccttgaccagggtgcttacgccaccccacgacgtagacagcctcccccacctgcgcaagttctcgccgagccaggtgcccgtgcagacgcgctcttccatcctcctggcggaggagacgccccccgaggagccagccgcccggccgggcctcatcgagatcccgctgggcagcctggcagatcccgccgccgaggacgagggagacgggagccccgctggtgctgaggattccttggaggaggaggcgtcttcggagggggagccccgggtggggctggggttcttctacaaggtgagtccccgagcaggtggctggagggtcctgggcctggggcgggggcgggtgggggcggggggaggtggacaaacccactattggatgaatagggctttactgaaggatgggtgggcgggtgggggatagatggggagccaggtatgaatggacagaacaggtgtgagtggctgggtaaggcctccatgggtgggagaggggggaaagggacatttgcacggtggggggcaggtatgtggggtgacaggggcctcagatgggatttgaccctgtctgttgggtaaggacttccacaaggggctgtgggggtgcagtggggtgagaggtcctccccctgtggcttaatgagtgaggccctcgggtatgtttgggggtgaggggtttccagtgggggctgacccagtcatgtccctcccaaacaaggtatgggtggccggacaagggggatagatagatgtggggaggggtggagaaacagggaggagtcatggatagacagatggatgaatggctggttgcatgggtgggtgggtgatggacagatagacggacaggaccaggatcttcagcgcacctccttgctcatcctctccttcaccccctcgcccccagcacgctcctaccacccctttcctggccctgccctgtgtccactgtctctccattcccatggctttcccagccggggacacctagggttacctgactggcctctgctgcctgcctccatcccgggccattttgcactgagtggtcggggattttgactgctccccttacccttgcttttagaatgaaagtcctccccagggtggccgggcgcagtggctcatgcctgtaatcccagcactttgggaggccaaggcaggcggatcatgaggtcaggagatcgagaccatcctggctaacatggtgaaactccgtctctactaaaaatacaaaaaattagctggcgtggtggcgggcgcatgtagtcccagctactcaggaggctgaggcaggagaatggcgtgaacccaggaggtggagcttgcagtgggcctagatcgtgccactgcactccagcctgggcaacagagcgagactccatctcaaaaaaaaaaaaaaaaaaaaaaaagtgagcacagcccaaagccctggggaggacttccttttcattttttttttttgttttgttttcttttgttttttgttttttgagacagagtctcgctctgtggcccaggctggagtgcagtggcatgatctcggttcactgcaacctccacctcctgggtttaagtgattctcttgtctcaccctcctgagtagctgggactacaagagcatgccaccacgcccagctgatttttgcatttttagtagagacagggtttctccaggctggtctcgaacccctgacctcaagtgatccacctgccttggcctcccaaactgctgggattacaggtgtgagccaccgcgtctggcctgtactcacttctgacttagtcctgcgccactgtcctcagctctgtgtcccagccacactggcccccttgtacttccgtgccccccagtaggtttgctccagcctcagggcctcggcactagctgtcccctctgcctggaacgctctgctctgtacgcccacctagttaaatcctgatcattctacagggtacttcctctgggaagccttcctgggtgtctccaggccaggccggggtcctcccgcagtgtagagtgtctgtgcccaacacgagcttttgctggcactcactgctgtctgctgcttttgtcttccccgttgggttaagcagtgtgtgtgtgagcggcacccagtgtatcccatccctgttgtgtcccagtacttagtgtggggctgtgcatacagtaggcaccaactaagtgcatttagaacaatgatgaaaacaaaagcacaggtgggtggcgggcaggctgggtggagggaagatgggcctccagccatgttgggggagggggtggctggctggactcggcgtctgtccccaggatgaagacaagcctgaggacgagatggcccaaaagcgggccagcctgctggagcggcagcagcggcgagcagaggaggcgcggcggcgcaagcagtggcaggaggtggagaaggaacagcggagggaggaggccgcgaggtgaggccgggcctgcccgggacgcccgctccttggcctgtctgccaccgcggaccccgtgagcggttctgatgccgattccctgtgatctgcaggctggcccaagaggaggccccgggcccagccccgcttgtgtccgcagtcccgatggcgactccagcccctgctgcccgggctccagccgaggaggaggtgggcccccggaagggggacttcacgcggcaggagtacgagcgccgggcccagctgaagctgatggacgacctcgataaggtgctgcggccccgggctgcggggtccgggggtccaggtcggggcgggcggagggccacccggcctcgctcgggttgctgtgacgactcagccctggcacgaagcccagcccgcggcctgctgggtgaggacccttgggggacggggcctgcccagtgccctttccggggctcactgggtgaggcccccatgggtaaggggggagggggagggagatgtaagcaggggtgccgggagggggcgggtatgtggggtgacagggggcctcaggtggggttggacactgtctcttgggtaaagacttccatagggggccgggcgcggtggctcacgcctgtaatcccagcactttgggaggctgaggcgggcggatcacctgaggtcaggagtttgagaccagcctggccaacatggtgaaagcccatctctattaaaaatacaaaaattagccgggcatatggcatgcctgtagtcccagctacttgggagactgaggcaggagaatcgcttgagcctgggaggtggaggttgcggtgagccaagattgcaccactgtactccagcctgggcaacagagcgagactccgtctcagaaataagacaaaaaaaaaaaaaaaagacttccatagggatgtggggtgcagtgggatgaggggtctttcttctgtggcttcatggataggaacctttgggagtatgtttggggtgaggcgttgccagtaggggctgacccagtgctgctccccacttgcctgctgggcaaagcatcctccctcatagaggggtccccccataggggtgctgcagagggccgaggggtcttgggcaggactgactcctcctgtgttccccccacagcctgctggaccgggtgttgtggagggcaggggcttctggtgggcactgacctgcaatctctgtccccaggctctcggctgagcaaaatctattcccagtccaccctgtcactgtccactgtggccaacgaggcccacaataacctcggggtgaagaggcccacgtctcggtgagtttagcccgcacaggcggggttcgtatgccgggtggcttcccagagcctgggaggtgtgtgggcatctgggtgaacctagagggcggtatggctcgagtttatggatacgccatgaagagatggagggacgcgtgtgggcacgtgtgcatggggcatagtctgtacctggcagacaggactcaagcatgtgcctcagtgcacttgagtgccaggtgttcctgtgggaggaggacagcacggggcactgcatggacttgggagggtgtgcagtgtataccgcctcctctgcagtgtgtgtggcccgccttttttttttttttttttttttttgtttttttgagagggagtcttgctgtgtcgcccaggctggagtgcagtggcgcaatcttggctcacggcaacctccgccccctgggtgcaagtgattctcgtgcctcagcctcctgagtagctggggttacccgtgcctgtagagacggtgtttcaccatgttggccaggctggcctcgaactcccgacctcaagtgatctgcccgctttggcctcccgaagtgctgggattacaggcatgagccacgatgcccagccgtggcccttattttccttggcccctctgcacatagggaagcttcccatctctgaccccacctccatcccatcctgaccccacctccatcccatccttctcccactgcagggctccctccccgtcaggtctcatgtccccaagccgcctgcctggaagccgcgaacgggactgggaaaatggcagcaatgcctcctccccagcgtcagtgcccgagtacacaggtaagcaggggctctgggtgatgtgaggagcaacaggcaccctcctccacagcccctgctcattcctgctgccccccaccccctcccactgcctcaccctctaggtccacggctgtacaaagaacccagcgccaagtccaacaagttcatcatccacaatgccctatcacactgctgcctggcgggcaaggtgaacgaaccgcagaagaatcgcattctggaggtgagcccgcccacacgtgggagttgggggctggtgggtgggtgggtggcctgacttggccagctgaccatttccagcactcctgcccaggaaattgagaaaagcaaggccaaccacttcctgatcctctttcgcgactcgagctgccagttccgggcgctctacacgctgtcgggggagacagaggagctgtcgcggctggcagggtatgggccccggaccgtcacgcccgccatggtggaaggcatctacaagtacaactcggaccgcaagcgcttcacccagatccccgccaagaccatgtccatgagcgtcgatgccttcaccatccagggacacctctggcagggcaagaaacccaccactcccaagaagggcggcggcacccccaaatagccccacccgggcggtccacgggccgggccctgtgtgctgcggccgccatcccctggaggacagtcagtcggtattcctgggtcctgtctgtccccaaccgtgtctgggtggggctggagtctccaccctctgactttgagtccagtcctgctgtgggggctgagctgggaggttcagggactcagggctcagctcagtccccttgtctgtcctcccccacttcttgaataaaataatttaaagagaagttgaaccttgtccccccctccgaggctggccggggtcccacactccctggctgtgtttttagtctcctgttctttctcaaaccaactcctgtcttcaacccccataatcccctaatgcagcttcagccagggcactcccagcccccagccagggctgtttcgaagctgcctctgaactgatctctcaggctcgaggtgtcccactggcccttcctgtggccttggccacccccgcttgctggattctcctggtctgtgtggctgttgttactggccctaaccagcgtttggcatggggccaacttctaacttgatcttgtctcccctggccagcctggtgtttccaggcctggcatctacctctgggccagtgattccaggtttctctgagatctgtgtttgacaatccagttgccccctgccattgcctgggtgtctctctcagatgcaaggcctgccctgcaacccaggctggcactggcttcccagctgccgcccagttctacacagctcagccctcccctcctgtctcactcgcttctctccagccctgtcacctccctgcaaagtccaagccaatggcctgggcctccccatgtccccagctgcctcctgcccacacagcagcctgtgtgacccgttcgaagcacaaatctgattatatcccttgatacttaaaaccccttaatagcctacagcccgctaatggcttcccaggcttaggactaaggaccacgccctggtcctgggccgtgcacaaggtctggcgcctggcccccgtccaggcacagaaacgcgttactaatcagttcccagagctgggccagagcctgcctgactccaagacttgagggcaagggccagtccctagtggggaacagacagtgggtgccaccccagggaggcggcagctgcctggggccacagaagggctctgagaggcaggggctggcgagacctgggcagccaggggctggattgcccttcccaggctacagaggctcaaggaagtttccgggcaggacccactccaaggccccaggcagcggagggactggcctctcgagtccagaactggctctgcggggtgaggccgggcagtatctggcctggggcccagccgccccacctcccacagcagccaatcccggcccagggccaggcactcctgagctgtactccctcgggcacctgggcagcaggaaggaggctcagaccatgatgtacaaacgtagctgtattggggagggggtggggaggggggatgggggagggacgggtcagtcttccttcaggctcccaaacactgcggctggcacgctctgctgctccagccgaacctctgtggggaaggcgggagccagtcaccctcctggcgttggcctgtcccccgaggcccaccctggtaatgccaccgtccccgccccagccgggccctcaccgttgggctccaggtccatctcgtcctcgtcctcgtcctcgcccagctggatctcctcggggttgacctgctgtgccagctctgccagctcctcccgggaggcgtcactcctagggacgggccatgctgcctcagttccccaccccgggcccccttgggacctgtcccagtcctgtcccgtccaaggatccgccctcacctcacgaacaggatcttgctctgggcgcgcaagggctggtcacgctccgcctcagccgccagctgctctgcccgctgttccagcagcttcatgtcgtccatgccactctgcccaggggccaggtcagacactagggggtgggagcagggggtcagcgccacgggggcccctcccacacatcggacgttgcactatcccagtcccccaggtgatggcccagccctcaaggagattgccatcaggatccgaggctcccagacccggaaagcccaggtcaggccgggctgagatgccctggatcaggaactcagccagctgggacggctcaccggtgcccgtggcactgcccgagaccttgagcatctgcgaggccatgaagttgacctgcgtgttgtacgtggcctgcacgctgcgccggatacgcagcatttccttgatggtgtcctcattgccatgccggacctcaaagtccttccacgtctgccagaacgcgccggtcgtctgcgtggggggcagggcaggggtgggtgtgtgtgcccgtgagctggctgactccgccgcagcccccaaccctgatacccgtccctccccacagccctacccgggggtcacagatctgggagcagaagctgtagatggcccgggcgcggtcaatctccccgagcttgcactccatgtctgcaaaccgcaggcacatctcacgcgcgtgctcgtccgacagcacctggacaccggggttggggaggccgggagtgaggccggggtagctcgggggctcccaacacaccatggccatccctgtgcttccagaaggctcctcctcagcccctcccacctgcctggaccccttccgtctgctcagggacctctggccccggcccagccccccacggtgggtacctcaatggccttctggtagatgccgcgggtgtgggtgaccccatagatctcggccgcccgcttgatgtagatgttgaacatgtcatactgctgggcgggctccacggccctggtggcacgctcgtacacggccatggcatgccgggccaggccccactcctcctccagctgtgcgtacagcaggtacaaggctgggcggggtaggcggggagaggggagcacggtcagccggggccagtcagaaacccagcccgcccgccaccccccccatgccctctgcccgcctcactcttggcatattttggggggcagccgtccagagcctgttcaaacaggtcccgtgcccgctccagcttgcggcccccatagcgggcaatgaatttggtcaggtaggtgctccagatgtcggacacgttgggccacttgaacagcgagatgccgcgctcgtacgcctgttaccagagggagagtcacatgtgagagtctgcagatagagaccaccaggcacccgggatgtccttgggtggcgtctgtagggagcctgccaggaactcccttggggcccttccctgtccacgcctccctgtccctaatggcagttgtgggggtctgtcctctgcactgtctccctctgtgagaaccccaagaacaggggtgcaatgggacctgctaagcacagtctggccccataggaggtgacatgatgggtgaaggtgggtggctccccagctccgctgacgctggctgcctgtccccagggagaaggccgcaccccctgacagaggggcaggcagtagcacgcgtatgcatgtacgacctccccatttgtgtatctgtataatgcccacacgatccatagaaacacacactcaaacatgactgctccggccgcgggacatggccttcccacggacacgcaacccaccccctggaccccacaacccgtctcctgagcagcggggcagggagagcccgcacacactggcaccaacaccctccccatgagtcatgggtgcacgtggaagtaggattctgtgcctgctatggaatgaactgtgcccccctcaaaacattcatatgctcaaatcttaacccccagtacctcagaaagtagattcgtttgaagatgagatcactaagttaaactgaggtcgttaggggccacctaatccattatgactgatgtcctttataagaagaggaaatttcaaaagtgacacacacaaagagaaggccacacaaagacatagggagaaggcggctgtctgtaagctaaggagagaggcctcaggaggaaccagccctgcccatgcctcgatcctggacttccagcctccaggacggggagaagctaaatctttgttgtttaagtcacccagtctgtatactgtgtcacacaagccccagcagattcgtaagttgctgaggacccctggggaggggacactgccatcaggggcctctgggtccaccctagcccctcaccttgaagctctcctcgaagtacttgtgctcctccaggaacatggcatagttgatgacgatctggggtgttgcgatacgcaggtccaggatgcggtcgtacacggccttggtggactgcaggggtggggatgggaaaggttggagctggttctggagctgagtccggggccccgtccctccccagccacaggcagctcacctggaaggtgccgaggctctcctccaggtcggcgagcatggaccagaccttcagtgacttgtacacgcggttctgcacgggctctgaaccatcaaagtactcggcccggcgggcaggcagcgccgtggccttctgcaggggcagacagtggccggggaggcgctcaggggctgtccctggcccttgccctacaacctgcagcccccaccccacagcctgggcctgttctcactcgcagcagccgcaaggcctcatcgtagttctcgtgtcggagctccagctctccgcactgacaccacacgcttgccaggtcatccacctgcttgaagttcaccttggtggccttctccaggatgacacgggcctgccggggcgggcagaggcgaggctgagaccctgcccacctggacagctcccaccatcaagggtcagaaaggtgaccatgctcacaaacatacaggcacaaacacacaggcacacacacaggcacacacatgcgtgcacatatgcatgcacccaaatgcacatgcacacacacgtgcacacatccatgcacaaatatgtacacacacatacatgcacacatatacaagcacacacacatgcatgaacacacaggcacacgcaacagggtgctcacatcgtccagctgtccgttgtcctcataaaacttggcaaacgccacccacagagtgtggggcttgcctgtggccttgaaggggtccaccgtctgcacagcctctgtgtaggtgttgatgatctggggacaggagggaggaggtcatataggactcaggaccctgcagatgacggtcggggcagagctgtggctctgaggggtggggcctggagggtgctgtggcccctgtcgggagaggccagaaacgaactatggcccttgacaatggtcaggaccaagagagagctgtggccctaaggggcggggccaggagagagctgtgaccctccaaggggcggggccacgagggagctgtggccctccaaggggtggggccaggagggactgtggctctgaggggcggggctcgggcaggaggagaaccccaagaacaggggtggaattggacctactaagcaaagtcaggcccctagaaggtgacattatgggtgaaggtgggtggctccccagttctgcaggaaactggccctcaggggtaggactggggcaggcttcatgtacctcccgggggcggccctggtgcagggcgacacgcttgtgccactcgtgcacgtggtgtgggttttggcgcagcaagacgctgttgaggagcaggggccgccggctgatgagctgctcgaagcgggccaggcgcagctccaggtccacatcatctgggagccgcgaacatgtttgtcaggggcggagacccaggatgcaggtccccggatgccaccgcctccactccccaccctcactccgctccagcccccagccaagtgctctgggccctagacactcagctcgggtgtccacctgagccccacccccagccccaggtactgtggataccccctcctacccccactgttcccctagccctcctgccctgccaggctctggcccaggcctgagaagtgtccccattcctggctccttcaagacccccacaccccctgcatccactcagcctccttccctgctggcccccagctgagcctcccagggctgcctcacctgagatgtgtcccgcccctaccgctaatgtccactcagctctctccccaccagccggggcccccagaggctcaccctcctcctcgcgccccagctccgaggcggtctccatctttgcagcgatcatgctctcctcgaactgggcgtagctgtcaaacacctgtgtgaagtcccgcacggtcatcactgtccggatggcctcctcgtacacgtcccgagcctgtggggacccagggaaggggaggtgagaggaaagtggcgcaggggacaggcagcagcactcttagcaccagcctcaatgtggaacccctgggggccttctgggtagtgacgcatccagcacctctgggtagtgaccccaggacagagcctccgtggagccttctcacccccgccctgccctgcactgccagggtggtcttgggagcttcaggacctcctcagtaaactgggtgactgccctttgcacacagtgacctcagggctcgactgagacacatgtgtgaagcacttggcacccaataggtggccaaaaaccccccagcgcctatgggtccaccctgcagggaccctcgcctcagctcatcctccgaggcctcagaatttgctccaaagcgtccctctcgcttgcctgaccctcttccccagcccgcctgtcctccacctggctcgcccaccccagctcaggtcccctctctctacccagccctgacgggtcttgccctgctgcctccgacagccttggcctacacgtgcccctggaaggggcgctgcgaagcgcataccgcccacaccccactggcggctcccccagccaggagcatggccagcccgtttggctttcgaggctcccaacctatcttccctgggttcctgagcctccccgctctcggctctggccccctctgcacccacctgcccccaggccatcccctgagcttgccactccactgcctgccaagagccacagtcagctaacccctgagggagtggccctcacaccacgtacctcctcagtgctgtgcctgcgtcactgagctgattggtgacaggcagtaactgtcaccctgattttacaaatgaagacaccccaccttagtggggccaaggccgcagagccagagggtgaaccctgaacgcaaatgtggctgactccaaggctgacgtgcctgcgggcaggagtgctcccccaccctcagcaggatagtaatcgtgtgcagggatatgcatgtctgtcaaaaatggcactttttttttttttttttttttttgagatggagtctcgctctgccacccaggctggacttccgtggcgcgatcgcagctcacggcaacctccacctcccaagttcaagcgattctcctgcctcagcctcccgagtagctgggattacaggcgcgcaccaccatgtctgactaatttttgtatttttagtagtgatggggtttcaccatgttggccaggctggtcttgaactgctgacctcaagtgatcctaccgcctcggcctcccaaagtgctgggatgacaggtgtgagccaccacacccagccataaatggcatgttttctgcctgtgcatgtgtcaacatgtgtccccgagtgtcggagggagaccccgccccgaacccagagccccgtgtgccagcatgcaccttctcgaaatggccgctgcggatgtagtagtcggcgagagaacaccagagcttgcccagctggtcggtgaagcgggtgaggcccccgcggatgatggcgtccacattgagggactgtaccttgtccggattctgggagatgaggtcgcacagctcgtgccacagctgcagggcatggggcagtgggggagagtctcaggctcagtcatggagggggtggccctcccacccagttgccggctcccggcaggcccacctggtagttggacttgccggccttagacacgaaacgctcgtcgttcaccacggtggccaggcgctgggcggcctcatccagccggtcacttgacttgaggtactcaatgtactcctctgcactctcaggactcagctggggaccgagccacccctcaggcagtcagtggggtggcagggctacgcccacctcccgattcagtggcttcggggcgtccccccccacccatttatgagtgtcttgggcaaaagcaagccctgtcaaaccagcctcagccccactggtccagcccggttcctactggtctagccttggccccactgggttaggctcaaccccctgtgggtcctgccttggctccactggtccagcctcagtcctgactagaccagctgtggactttttgggttagccttgacccgcaagggcacagccttgactgcggtggtccagtctcagccccaatggtccagccttggtccttttgggttagaattgacccccaacccacaatgggtccagccttggctccactagtccagcctcagtcctgactggtctagccttggcccctttgggtcagccttgatcccatgggtccagccttgactatagtgtccagcctgggccccacgggtccagcctcagtcctgactggtccagcttagaatccaaacgtcataaaacagatactttaagtttgagcaaaccatgccccactcccgcccggctggtgcttccactctccaccctgcctgcttctccccacccctattcctggccctcttcatggctgtggttttactctagttcatgccatcagctcatatgcatctgtcttcctacttagactaaaagctccgtgcaggcagggagtgtcttagtcacactgtcctcagcacccatcgctatgcctaatgtgaaaccagtgtgaacaaactatttggaaaataaagacatgaatcacggacaacaacaaaacacatgcatctccaggagcctcttcccacatcccgtctgctgggtgacatcctacgcggagctagtgtcacagtgaggccgtttctggaaactaacctggggaaccagcgcacctgctaggctcaccttgaggaagcgccgatagcctcgcacagctgtctcaggcagtgggtgtgagcgcaggaagcgcagatacaggggccaaattcgagagtgctgcgtgatgggcagtgcccggagggcacggtcgaaggtgcggcgggtgtgtgtgacgcgcccctggtccatgaggaactggcagtaatctagccacagacgaggcatctgggggtgtggggagaggcggctggggctaagccacggactccatggcctggccacagacactcgatgtcctgtggctgagccacacctggggccaccacataaatgcggcgggacccagaaacccccagctccaggactgagtccagcccaacttcccatgcaaagaagcaacaggaatccaagcccccatccctaacatgctgagcccagcccctgtccccgccccacccaccaccatggactgagctccacttcccgattcatcccctcgccgagccccaaaccttgtgcatgaacacaaaggccctctcatgacagttgttgacatcttcataggcagggtcggtcacacagcgatgcttcacctgtgcccgacgcgccttcaggtatcggtaccagagtttgtagctggggaataggaggggacagatgctgatcggtcagctttatggacacccccagaaccatttgccctgccccagttggcaaatgtgggaagaaggggtgtgggaggggtgacatgtctcagcaatgacagggacagactgggacatcagagaaggtgtgctgacccatcaagggatgtacaggtcagtgatgaaacacgaagcaatcacccgggacccgggacccacttggcagttttgttataactggaccaggtggggtgggggctggtgggcagggcagctggagccattcccacctgcagggcagcagcttgagtgcccgctcgtatagctgattgagcctgggcttcggggcgccctgtttgaactcgatgtagcgaagccagcatttgacagagaattggttccgcatgatttcctcctcataggggaggtcctcttcctcctgccagggccagggaatgggaagaagagaggcctaccctcagagcctgtgtgcagcaccatcccactgctggggctcaggtccaaactccggacttttacctagatcccaccacccaccaaggaagtcaggtcaccagatgcccaggcaccaaaccagatgcccgacaccaagacagtggcccagacctttacccctcagaattcaactacccaaaatcgaacccaaatcatcagacttctcagtcattagggctctgggccaggaatgagtccgcatcaccactcgctttctgccccagatggtcagactccttagataccaaggccctggcccagatgccagtcctggacaccagaccccacttcttcaaaacgtgcctcttcccagacaccaggcctttggcccctcagactcccactgtcaccatctgacccatctccaccccaggcccagatgaccagatctttaccccagccaccagggctctcaggtccagattccaagccactagccccgcccccaggatcccactagccagcgtctagctcaactctgccccagaaattaaaagctaggcctttatctcacaggaggagttatacaccagaagccaagcctttaactctgcacaccaagaatctggtgaagatgtcacgcctctactccagagagtaagtatttcactggccatcgcctgacaagctccacatcaccagggttcttctagcctggccaccaccccagaaactgtcatgctgcagtccaggcctagagaccgctatccagaaaaccaagccttcatcccagaaaccagaaccctggcctcgtaagcaagcctttacttcagacaccgatcttcacctctcaaggttcagttatgcgatcttcctcctctcccattccctgcacgcccccatttccgcccctggttcgggaggctagacgcttcccttcgacagtggttttctactcagacccgaagatacaacaccatatttttactcctggacagttcggtgcggacatgacgatccggtctctggcccattagggttcccagaccttggcctggcagtttcggcctaaatctccttgccgacccagcctcgatcccctgcggcgtccaggtcccaatgccccaacgcaggccacccccggctcctctgtggactcacgaagacaaggtccggccgctcgggccgcgagagtcgcgccatcaccaccatttttctggatgcccaggtacaggagagagtcgcgcgcttatgacgtctaccactgacggcccgcccctccgagccagacccgttttctattggttaaatcatttttgacggacaggcccacgttattgacttcttttcgacgacgccagcgaccggaagcagaatagaggcgccagaagatgcgccatcaggatacacattggccaatcagcttcagcaatggagcgtgcaaaacaccagtgagcttctgtcttgctggagggtcggctttgggcggaactggctttgttgaccgggagaaacgagatgggggtgaagctggagatatttcgggtcagtggacacaggagtgggttgggaggctgggcaggggatcttcctggatctgaagatgaggttggaaatggggggacttcaaaggaagagggagctccaaggagaaagctcttaagatttgagaggaacctttctggttggaaatccaggagaggggacgctgggctgggggggttctcggatttgggcttctgggtttgggggctgtgagagggctggtccgaggaaggacctcagagaggggtgagctgagaagggggctctaaagaaggaagacttaagatcctgggggagctctcgggctcgtggtgggtgggtgtctatgacagggagattcctagacttcgagaagtggagttgaagagtgacgcctcctgggtttgggggtgctcccgggatcttaagtggggatgggtaatgaggtctcgaggagatgcttttgattgtagctggggcgtctgtgtgtctgtctgtgtttgagaggaagactccagctcagagggaactttcaggaatgaggcctcctggattataggagttaggttttagggtgcgaggtttctgtacccttggtgggagttctgggattcttgggtcggccgtaacgaggcgcttctggactctgcagtaggatgggtcccccaggctctgaggagcctctgcacattgcttggggggagctcacctcacccaccctctgccattccagatgataatctacctcactttccctgtggctatgttctgggtttccaatcaggccgagtggtttgaggacgatgtcatacagcgcaaggtgggcataagaggagtgtttgagggttcattccaggggtgggagagggtgtggggcagcagtctgctggggactaatgtctgcctcccataagccgaccctgccctgatgtggggctctggaggcctttggctcgtgtcccatttgtgacttttccttacagagggagctgtggccacctgagaaggtaagtgatctcttcttcctgccagagggatggaggaggctggattcttgtatccgggatgggttttagatgaaaattttaggccaggcgcagtggctcatgcttgtaatcccagggcatgggaggctgaggtgggtagatcacttgaggtcaggagttcaaaaccagcctggccaacatggcgaaaccccatgtctacagaaatacaaaacttagccaggcatggtggcaggcgcctataattccagctgcttgggaggctgagggagaagaatcacttgaacccaggaggtggaggttgcagtgagcccaagatcacgccactgcactccagcctgggcaatagagtgagactttgtctcaaaaagaaacattttactctcagccatgagtaaggaaccgagagcagaggagtagatggtttccttattgccttctcctggaagagtgaagcggatcccacgcggacccctttgtaattggcagggggcttccagtgaagacactgaaccctgaagccgtggtctggggcagggtggtgggagaggtgggcgggggggggtggtcccggctctgaggtgtgtgcccctccccccttcctgtcccacccgcttctccacccctagcttcaagagatagaggaattcaaagagaggttacggaagcggcgggaggagaagctccttcgcgacgcccagcagaactcctgaggcctccaagtgggagtcctagcccctcccctgatgaaatatacatatactcagttccttgttattcatttaagtgttttattcttttatcagtttttgggggccgagtgagacccaggatgcctcaggccctcagggggcttgtgtcgggggctgggggctgctgttccgacggaagccgagagcggtcgggtcctgaggggtgagcaggggttggggactgagggtcccagctcgtttctgtgctccgtcctgtggatgaagaggggtcagccagggggagggctcaagggcagtgccggccacaggtggcgaacaatggagagagggtgcaggtagccaccgtgtcccacctcattgtgagcactggtctatgtttaccctcaatatctgccatttagggtggcatttgagtgtgaggtggcaggtcttggggccctcgctgggatcttgatcagaacccaagcttcgtgtatgtgtgaagtcaacagatgtgagtatacagatgtatatatcctatgtgtgagcttacgtgacttcctccctgggatactttcctaggaaggggtcctattttctccctttggcctccccagaaccttcagacttgggggcaggagccacaagttccagccatgggtcttacactagcatggcccctgtataaccttgggcccctctagccactgcctgggccttggtcctcccatctgaagtcagggcagcggatggacagagatggggcaggccctgttccctcctggctggggtggagggcaggatcggagagcactgcctggcgggtttctcctcgacatcgccagaacatcacctaccttggaccccacgggctggaagccgggcaggctgctgactgtcacacgttggtcatccatgcggcggccctgggtactggccagcatgtccatgaggctgtccatctcgggggtggggtcgctctctgcgtggacgttcacagacttgggaggacacagccggagtgggggcccccaaccctaccccttcacccccacacagatgcttcagggtgcacaaccacctcccacatcccgtgcccccaggccctccagatgaccacttgccctgcactcccaccccgttcacgccccatggacagcacccccgtgcccatgctcacggctcttggtggtctggcccggcccggcttgcagtgaacagcgctgtccctccatccggtcgccctgcacgtggctcagcagattgaagaagccctcctggtctggggagcccgcctggggacagactcgctcagtctggttggcccttcagcttgggggcccctccccaaacttcctagccagcttgctcacaccctgaccccggggcctgccgtccccacttcctcagctctcaccatggtccccgccgatcctctctgcagagctgttctgaatgagacatgagtctccttcccaatcccggcccccgccccaggggccctggccagcagtgccacttcacgtggtaccgcttcaagggacaggctccgatgcgtgtcccgccgtcctagattggggcctgatgagtgtggcctgggagctgggacacgaatcagggaaacatggcccaggagctacccccaggtcccagcatctcccatcaataggggtccacacggagagccctgccctctgccctggggcctggcactcagacccccaagcccaccagcccctttctacagccacaactgggtcagggggtcctaggagactcactcgttaattaggtgccctacaaactagtcttgtcaatcatgggctctgagaccttgagctgggggtggggtgggggcagggccctctcacctcggcacaggggcctgagccttcctccgtcttctcctcctgatccatcatgtccctggactccagtcacttttctgctggcctctgccccggcccagtgccagagagggccttttaaacgtccaggacgtgggggtgtggattccccccatccccaaatccccagctcatgccccatctgctcccacccaagcttaagccccataaagatcatccagataattgtttgcccacaacgatgctggatctggcatggtgggtagggggcagggcgacctgagcttggacctcgctgtgcccagcagcaatgactggaccccagggactctcaggtgtgatgtcacaaaaggcctgagcagcatccccacagttggagaagggaggccaacagtgtagggtggtagctggcttagggaggacttgcaggtgtccccacccagccacccaggttcccccactggctcctgaaagggcagctgccacctgcagtcggtacagaaaaaggaggttggagtcaaaggccccttccctccctccctctctgcacctgcctcagacaccaccggccaccctagctccagctctgtctccttggcagcaagtcaaggggtctcccagccacccttccttcaactcactgtccctggagcctggttgcctgccccagaccccaaaacaagaaagtctggggtctcctgttcccacaccacctaaatgccaggttgagctatctcctctcctctatcaccctagccccaggtgggaacaggaggcgagactccctggggacagaggcaggcggggagaggacgtccctgccttttcccccgagccactgtggctttccctcagtgcccaagcaggggataccactgggaggtccccatccccttcccttccctccccaagacgcctttacggaaaccagtggaagtttcatctcagaatgaatgggctgcactatcaccacctctgcccgagcctcctctgttccacaaaaggccaagttcacactctctccctctatgccaatgaagtgtccccctcctcagtacgtgtatccctttcctaggcctgccagaacaaagtgtcatagaccagatggcttaaaacacataagttgacttttgttatatatttttatatagagatgaggtctcactattttgcccaggctagtctcaaactcctgggttcatgtgatcctcctgcctgggcctcccaaagtgctgggattacaggcatgagccaccatgctgagcctttaaaatttttttttaacaaatttattgagccaacgttccagaggccacagcctgaaatgaaggtgttggcagagctgtgctccctctgaaaaccaggtctcaggagccctccttgcccctccctggcttttggcagtggcctgccgtccttgatgtccttggcttgtcactgcagctcttcactccctgcctccgtggtcacatggcattctccctctgtgtcccagtcttcatatacccatttccccacccccccaaccacctacacagaaccaggcagacatataactatcttacaaggacaccagtgatattgcattaggggcctactctactccagtgtgacctcatgctcactgctaatatctatactaaccccatttcaaataagatcctattgtggggtattggggattagtacttcatatcttttgggggttagtggtggggtggctggccctaacagctctctgtccccccaaggggtcaggctgagaagctggaggcggtcctggcttccatccccccaggatctggagggttccccgccttcccctgctcaaaactcttgagaagacaaaacccaaacacctaggggttgtggaaatgttctaaaatggattgtggtaatggacacacaactccaaaaatactgaaagccattgacttacgcaccttaggtcagcgagttgtatggtatgtgaattatatctcagtaaagctgttacaaaaggaggaaggggcagggtgcggtggctcatacctaaaatcctaacactttgggaggccaaggcaggaggatcccttgagcccaggagtttgataccagcctgggcaacatagggagatcctgtctcttaacaacaacaacaaaatcaaccgggcacggtggcgtgcacctgtagtcccagctacttgggtggccgaagtggaagaatcccttgagctcaggaagtcgaggctgcagtgagctatgatcgtgccactgccctccagcctgagcaacagagcgagacccgtctctttacaaaacaaaaacaaacaaaaatggggaggagggagaagaaggaagaaaggaagggaaaaggaaaggaaaggaagaaatagctcaaactcctacctacggttgccaaccgtcctggtttgcctgtgactgtcctatttttagcactgaaagtcctgcatcctggcactgggatgggtcagtctgaccttgtcctacagaagtctggcccctgctgcccccaccctccagccttcttaagctcggggctcctcccttctctacctggacatgctgtgtggctgcttctagaatccatttagggataatgtcaaaaggctgcttcttcagagaggccctcgggggtcatcctcagtaaagtcccctcccacccctaccttctgtggcacttgttgtcacattagtttatttcctttagggcagcatggatcctttcctatctcccccagaccttcgggtctgattcactccctatgtcccatgtaagtggcagggggcttggtaccttcatcaacacggccgagcgaaggaaccagctcagaccagcaagagtctgtttgcacacatacctcgcaccttaaatcggagacctcattttgtatgggtgctgctggggctgtgccttccaagcgacaggacacacagcagaagcagcttctgaaattccgagtgtgtgtctgtgtttgcaagcatttgagggcgtcactcaccccatgtgtgtatcagcatgttaattcgattgttggtccacgagggtaagcgttgcgcctcccggaagagggtaaggctgtgacaaatgccccctggggacaggctcctggcttgaacccagcaggctcactcgtcgtggccttggattagggatcccgctaagcctcggtttcctcgtcggcaccgcagtccaggtcggaacattgggcaggactgaatgaaaattatgtccaggtgcctgcacacaagaggtctccaggcctcctgaatccatcaaaagttatccaagacggctgctgctgctgctgctgcctctaaaccctgaagtacagaaggcaagtgggtcaagatcccaggcccagacagtggcggcccggtggcatcgagtgggtgccgtgtatcttgcaggcacagaacctcccggggaagatggagggattattgccctgcgatcctgcttcgcacgcaagccaggaagtgtgtgtctgaactcccatctgtgagcgtgtcgtcgaggtgtgcacctccagcgacttcgtgctcggcagcgcggacgcacctgcccgtcctccccgccagggactcaacttcctgggcctgggcgagaaccgacggcggggaggggccaggtgcgcagggggcggggacagggcccgcggggcggggtccacgtgggtgacgcgcggggccacgcccccaccttgggacacacccggaagcggcggcggcgcccctcggggaagatggcgccctcggggctgaaggcggtggtgggggaaagtgagtgcctctccggggccgggctctggcgtccggtgtgggacgggggtcggggacgcacgggctctgggatcctgggtttcatggcggctgggagttgggggccgggctgggcgtccgagcacctgaccctcgagggggcgggcggggacgggttcccagctggacgcccctgctctccggtgccagaacagaacaaaattggggggccggactccggggacccaaaggggacgggtagagtgtggcggaggctggggcccggactcctgggcctcctagggtgcctgccgggggaggagggcacagctggatgcccacactctaggatctcttaagccgggcaaagttcaggggctggattcttggggcctcctagggctctggtcagcgaccctaggtgctgtgagcgctcaggggacgtgtccaggccccacaggggtggtgtaggggatgtcttcctccttgccccatttccaggagcgccttgcagctggaggacgcaggcgtccaggcctcaccggccccggttcttgggggaagggtggagggcgcctcttcctccaccccggggagttccggcctcagctgctccttccgccctggccgtcttgataacagtggacatgacacagtggacgtggctgggcggggccaccccgttacttctctccactctctcctctaggcagggcggtctgtagctcaaacccctttaattgggggagattagaaaaaagtgattccattttacagatgaggaaactgagaccggaggtcagtgggatagcctcagctaggcatgcctcagagctgggaaccaggggtcctacattttagaccaggttggggggactggctgaaaccctcacagcaggaatacttgaggtagcaggtggggaagccgagagcctggcgctagaggcagatagagctgtagatgatcccggttctcctcttttcattcacctaaaacatgtttatcgagtggcaccttttgccccagcactctgccacttagacactcaggatgcgtaggtgagttacatgttgcctaagaatctgtttccctgtctgtaaattgggggtgaccccagaagccaatttgcagaactgggggctaaaaataaatgattcctgtgccgtgtctcacacctgtaatcccagcactttgggaggccgaggcaggaggactgcttgaggccaaaagtttgagaccagcttgggcaacatagcgagaccccatctatacagaaataaaaataaattagctgtgggtggtacatgcacctgtagtcccagctactcgggaggctgaggcaagaggatcgctggagcccaggagttggaggccgcagtgagttatgatcacaccactgcactttagcctaggtgacagagtgagatcctcctctcttaaaaaaaaaaaaaaagtaaatgggaattaagatgggggttcagccccaaggctgagaaggcttggggcagtggtgggaccagagaaccagcattctgacccctcccctcccttccctgcagaaattctgagcggagttattcggagtgtcaagaaggatggggagtggaaggtaggggtgaggcagatggctgggtacccagaggcagctcatcatcaggcctatggggaagaccctgaatgtgggacccccaagaactgcctgtccacatgggtggagttgggtgaatgggttctgggtcctcccacccagccagcccttgaaactgcccctcccactgccttggccccttctggggccagctgtggcctcttccgcctgctcctccatccatctgtccatccatctggacaggtgcttatcatggatcacccaagcatgcgcatcttgtcttcctgctgcaaaatgtcagatatcctggctgagggcatcaccagtgagtgaacgcgtccccagtgagatgggacctgagcgtgggaacccctgactgtgcccctctcccagggttcagcccttgagtgtaggatcccctcaaatcgtccagaactcccaagtacgcagctccctgcacggacagcccggatcatgtgaccaaatccattcttaaaccttgcaagctgactgcgggagcccatggattgcaggcctcccctgcagcactccctggctgcagccccttcctgaccgtgcagctccctcgtggagccctgtgtgggactcccagggtggactctggatgtggggtcccaagaatgcagagccttctatgggtgaccccaggtggtgtcccagtcactttgccattgagggataggtgctgagggagcctgtcctctcagaacctcagtctccctgtctgtaaatttggggaacccagttggctgcacaacccctgcagaaccctgtcgtgtggctcttagctggtggtccctaagtgggtttctcctgcagtccctcctaagcatccacccctcctccccaagcctccaaccccccacacctgagactccccacgtggccctgcctggatgccacccacctgtgtcccttcctctgttcctactagttgttgaagacatcaacaaacggcgggaacccattcccagtctggaggccatttatttgctgagccccacggagaaggtgcctacatgagtgagcgtgtgtgtatgcgcgtgcatgcgtgtacatgtgcatgtgtgtgtatgtctgcatgcatgtgattgcatgtgtgcatgtgtatacgtgtgcatgtgtccatgtgtatgtgtgtgcatgtgtgtgcatgtgtgtgtgcatctgtgtatgcatgtgtgtgcgtgtttgcatgtgtgtctatgtatgtgtctgtgtgcatgtgcatgtgtgtgcgtctgtgtgtgcatttgtgtgtatgtgtgtatgcgtgtgtgtctgtgggtctgtgtgtgcatttgtgtctgtgcatgtgtgtatgcgtgtgtatgtatgtgtgtgtgcatctgtgtgcatctgtatgtgtgtgtgtgcgtctgtctgtgtgcatgtgtgtatgcgtgtgtatgtatgtgtctgcgtctgtgtgtgcgtctgtgtgtatctgtgtgtgcatgtgtgtatgcgtgtatatgtatgtgcatctgtgtgcatgtgtctatgtatgtgtgtgcatctgtgtgtgcgtgtgtatgcgtgtgtgtatgcgtctgtgcatgtgtgtatgcgtgtgtgtgcgcatcagtgtctgcatgtgtgtatatgtgtgtatgtatgtgtgcgcgcgcatctgtgtgtgtgcatgtgtgtatgtatgtgtgtgcatctctgtgtgtgcatgtgtgtatgtgtgtgtgcatctgtgtgtgtgtgcatgtgtgcatgcgtgtgtatgtgtgtgtgcgtgcgtgcatctgtgtgtgtgcgcgtgtgcccatgtgggtgcgacactagtgtgcatttgcacatatacatgtccccgtccgtccatgtttgcacatggtggcagatggggggtggctgggaggcctaggcagccaatgagcctaggtgtgcaggctcaggcccagagagtgatccaccttccccagtcggttcaggccctgatcaaagacttccaggggaccccgactttcacctacaaagcggcccatatcttcttcaccgacagtgagtgaggagagcctagggtgttggtgggtggggcaaggaggtgtgggggctgctctggcctgatgccccactcctgcctcaccccagcctgccccgagcccctgttcagtgagctaggccgctctcgtctggcaaaggtggtgaagacgttgaaggagattcaccttgccttcctcccctacgaggcccaggtacggcccgggctcatcctgggcagggggtgggggtttgtgaccaaatgtcccctgttccctcagaaacagacactgaggctgggcgcagtggctcatacctgtaatcccagcgctgtgggaggccagggcaggaggatcacttggggccaggagtttgagaccagcctgggtacagagcaagaccccgtctcttaaaaaaagaaaaagaaagaaattagcttggcgtggtggcgtgcacctgtagtcctagctactcatggggctggggtgggagagtcgcttgagcccgggaggtcgaggctgcagtgagctatgattgcactgctgccctccagcctgggcgacagagcgagatcctgtctcaaaaacatacataaagtaaaattttaaaaaggggaggtacccacagagtccaaggagctcttgccttgagttctatcccactaggcccttgcagggggcagcgtagagcgcaccgcggggttgtccagccagcttaagggacacgggctggggtatttatccactgactcctgcaggcatgggtttagggttgacctgggcctgcctccaattcggcaaagcaggcttcagggaccagggacggctcccaggaggtgcaggtggcggcagcgggaagcggggcaggtgtgcacctgcagcggcaaccctggtgcttctgtcccctcctcgcccaggtgttctccctcgatgctccccacagcacctacaacctctactgccccttccgggcagaggagcgcacgcggcagctcgaggtgctggcccagcagattgccacgctgtgcgccaccctgcaggagtacccggccatccgctaccgcaagtggggaccccacccagccccaccccgatgccgacccccccttaaccgcgtgcaacacctaacctttaacctctcttgtgaccccagccccggccctaccctggcccctgactctcaccttcaaacccatccttgaccccatcccctgatgatgtcccccgtgtctgacctccccgccaggggcccagaggacacagcccagttggcccacgccgtcctggccaagctgaacgccttcaaggcagacactcccagtctgggcgaggtgagggggcgtgcttgggaggtgaggggcagccccaaccggctcagggtcagtgcctcattcctgccctaaaccccaccccagggcccagagaaaacccgctcccagctgctgataatggaccgggcagctgaccccgtgtccccactactgcatgagctcacgttccaggccatggcgtatgatctgctggacatagagcaggacacatacaggtctgcagacttggaacccgtccccacccttgccactgacctggttccccagtcctcagctcccctgacccccaggctccctccttcctccccaggtatgagaccaccgggctgagcgaggcgcgggagaaggccgtcttgctggacgaggacgatgacttgtgggtggagcttcgccacatgcatatcgcagatgtgtccaagtgcgtgcacacggggaccggatcccccccccaccgcccactgtgggcctggtagcggccttgggatccctggctgctgccaagtctttggccctcatgagcacccctcgtgtgactccagactggcctccaatttcaccccacctctccctgtcccccctgagtgggctcacccatggcctgtggctcctctcccctcactctcacccccgcccaccctcatggccaggaaggtcacggagctcctgaggaccttctgtgagagcaagaggctgaccacggacaaggtaggggcggacccaggtcaccaaaggcgctggtggaaggaagcccccctccccatgggcgcagggccacagcctggatttcgagcctggactgagacccaggtgggcactgcctggcttcgccccccaatccctaccctcttccccctacttccccaggcgaacatcaaagacctatcccagatcctgaaaaagatgccgcagtaccagaaggagctgaataaggtgtgctcgggtgggcagggagcggggacacctcggcccctcaaccccatgctctgtctgcgttctgccttgactcagcctttgttatcccccaacccccaccctgcaccctgcagtattctacgcacctgcatctagcagatgattgtatgaagcacttcaagggctcggtggagaagctgtgtagtgtggagcaggtggggcagggcttgcggggggcaggggtgatggtcctgccaaggcggggtattggggaggggctgaactgtagagatggggggttctgggggaggggcagggcttgtggagaggtggaggggccttggagagaggtgggacctggtggggaaggagtgggtcttgtggagaaacggtcctaggatgagggtgtggcctgtgcataggtggatggggcttggagaggtcagacttgggtgaggggcagagccttggacaggtggtcccaggacaggaatgtggcctattcataggtgggtgggaccttggagaggtaggcagggccttggagaggtgcgacctgggagaggaatggagccttggagaggtgggacctgggtgaggggcagagccttggagaggtgggacctgggagaggaatggagccttggagaggtgggccctgggagaggggcggagccttggagaggtgggacctgggtgaggggcggagccttggagaggtgggacctgggtgaggggtggaaccttggagaggtgggacctggatgaggggtggaaccttggaggggtgggacctgggagaggggtggagccttaagagaggtgggacctgggagaggggcggagccttggagaggtgggacctgagtgaggggtggggccttggagaggtaggagctgggagacaggtagagccatggagaggtgggatctgggtgaggcacggggccttggagaggtgggacctgggtgaggggtggaacctcggagaggtgggacctgggtgaggggtggagccttggagaggtgggacctgggtgaggggtggagccttggagagctgggacctgggtgaggggtggagccttggagaggtgggacttgggtgaggggtggagccttggagaggtgggacctgggtgaggggtggagcctcggagaggtgggacctgggtgaggtgtggaacctcggagaggtgggacctgggtgaggggtggaacctcggagaggtgggacctgggtgaggggtggagcctcggagagctgggacctgggtgaggggtggagccttggagagctgggacctgggtgaggggtggagccttggagaggtagtctcaggatagtggtgtgacctgtgtgtaggtgggtggggcactggaaaggtgggacctgggtgaggagcagggcctgtggagagactgtccctggacaggggtgggaccttgagagacctggtgctgagatgaggtaggacccaaatgtcctcttgccgaggatcctggggatgtccttggcccgcctctcccatccccttccctgacacatagcggccggtggacggctgaccccatgcccgcaggacctggccatgggctccgacgcagagggggagaagatcaaggactccatgaagctgatcgttccggtgctgctggacgcggcggtgcccgcctacgacaagatccgggtcctgctgctctacatcctccttcggaatggtgggtgggggctgcagggagttggaacgtccccatttgccagcgtctcccacgatcctgggaactgctgaaccccacagctctccttgggtcatttgcactcaccgggctcaccaacccccacagctacccctctggacccgggaaccctcctccattggcttggggattcctccactgaggtgagggctccctgctaacgtagaaaccctcacatctgtgattcctatagatgtggggctccctcagctcatctggaggagcccctgatctaccccctccaggtttcccactcttgctcacactagcacagggtactgaggccctccccactgcaaggttctctcatcagagtcctgggagctcctcagcccaccccaaactcccctaaacctgggagctcacctggccgccgcctccaccctgcccattcccgtcccccaggtgtgagtgaggagaacctggccaagctgatccagcatgccaatgtacaggcgcacagcagcctcatccgtaacctggagcagctgggaggcactgtcaccaaccccggggtacgccaggagcgggcatggggggaccctgggagagggtgcggatcacagccggggctctgcaaggcagagggccattggtgcacaggcacggtgtggttcctggcgtggtgtggttgctgggaggccaaaagcagtgtttcgggtctggtctggggcccagaggacactggggcctctcccagtcccagcttacacaataggcaggggaagtgagacatggtcgctgccaggctggtcctggcagtggtgcagttgggagcgggtggtctgagtgctagaggcagggagtagggtccccagcatgggggctacaccacattgtctatctgggctcccaggggtctctgagggtcccccgcacccatccagcacccacacacagccatgtgtgtgcttgactcttgggtcagcctctcctgtctctctctggccctgtgcgtccccctccagggtgccctcaccccgtccccatctctcccccatccctcatccatctcgctgtgcactgtttctccatatctctctctctcacccttctctctgccttcccctttctctctgttctctgtcttgctcccctcccctctccgtcccccttctgtccccatcttcctctctctgtttcctgcttcatctcttgtctctctctttgccttcatactttgtctcactgcttcttatctctttgcctatctctgcctctgtctttgtctttctctggctcgctctctctccctttggctttctctctccgtctctctctggctcactgtttctctctctcgctttcttgctgtctctcgctctctctcgctctctgttccacttccccatctttgcctgccatcccccaccctaccagccacaccaggcgcagcccctctgtgaccagcctccttcccctcaatccccctgctgccctccctgccctgcctgtagggctcggggacctccagccggctggagccgagagaacgcatggagcccacctatcagctgtcccgctggaccccggtcatcaaggatgtaatggaggtactgggtggcaggtcagggtgggggccagccctccgcatcggctggcggctcagcctccctcctgctgaggtgctaagcctcagggcttaggggaaaatgctcattgctggcattcccttggcaccgatctgctctgctgaggggggcacgccaagcccgcagctgaggaattggggtgacagcggggcctgtgctggggagcctcacttcctccccacctgccggctgcctccgctatatctctctagtctgttcccctgtcccgcaggagtgcccctgagccccagccctggccttcccaggatcccagggcagcaccatccaatggcaatgggcctggggcggcttcctggcttcctccttgtccctctaagagccccggcccctctttctgcgtgggggccagagacctgggcctcctcatccccatggaccttgaatacctggacttctggggctctgaggggctgagagcccagacactgggttccccaaagggctgggggtattgactgatggtccccaagggcctggaggcccagactactgggttgccgaggaactgtgggtttagacttctgggtacccaaggagttatggaattagattcgtgggtccccagtgagttatggatctagatttctaggtccccaatggactagaggcctagactcctgggtcccccagaggcaggaggtggagatgctggttcctgtctgccaggatcttggcccctgaataccccgtggggggcactcctgaccccggaccccatgcctggggttcctcccctaacctgcctctcggccgccaggacgccgtggaggaccggctggacaggaacctgtggcccttcgtatccgaccccgcccccacggccagctcccaggccgctgtcaggtgaggccccggggccgcccccgcccacgcctgggtctgtgttaggtgggcggcctggcggcggtgagggcctcctgcctggactttctgcccctgccctgcacagtgcccgcttcggtcactggcacaagaacaaggctggcatagaagcccgggcgggcccccggctcatcgtgtatgtcatgggcggtgtggccatgtcagagatgagggccgcctacgaggtgaccagggccaccgagggcaagtgggaggtgctcattggtaagtcaccaggactgggaccctggggtctggggcttgggttcccggggcctgggcttgtaccttctaggtgtctggactccagagtccttggagtcagggacctggtttgctgagggacagggacagccccacaccagccgggaccgggagcctgtcaaagacgaaggcagcgccccccaacatcttccccaaacctctgcccctgcacaggctcctcacacatcctcaccccgacccgcttcctggatgacctgaaggcactggacaagaagctggaggacattgccctgccctgacccctggccccgccccctacccctccctttccagagaaataaactcttcccgtcgctctgccagccagtgcctacctcaccttcttatcaagggagtccctgggagttgtgctgagccaggcctgtgccccaggccccaccaacccctattatcctctcagaaggagaattagcctctccctgcccctgagggcatctcaagccctcatggaggttaagaacttggacttttggcagggcacggtggctcacgcctgtaatcccagcactttgggaggccaaggcgggaggatcacttgaggtcaggacttcaagaccagcctggccaacatggtgaaaacccatctctactagaaatacaaaacaactagctgggtgtggtggtgtgcacctgtagtcccagctacttgggaggctgaggcaggagaatcacttgaacccaggatgtggaggctgcagtgagccgagattgcccctttgcactccaacctgggcaacaaagcgagactccgtctcaaaaaaaaaaaaattggactctcatttgaatatcagctctaagatattctagcggtgaggccctgaccaacttccggggttcccaatctaaaaacagggagcccaaaatagcagctgctttgcagaggagagaacagagatagcgcaggaaggctggtggcgtgcaagcatgacagctgctgctaccccattttcactggaaccattttggctgctccgttaatattgttattaagcagaatggaccctggaactccaacccccctagaactgttccaaggggacctgtaggcatacgatgccaggagttgtgttcagcttctgctgtattcatgtgaggcacacagcaaacgctccctgctttctcctcccagccccacggggttcacagagactcctgactgcaggacttatcagggccttcggtgggtgtatctgtttgctagggctgtcataacaaagtaccacagactaggtgacttaacagaaattgccaggcaccgtggctcatgcctgtagtcgcacattgggaggccaaggcaggttgatcacttgaggccaggagttcaagactagcctgggcaacatagtgagatcctgtgtctacaaaaaaatagaattagctgaatgtagtggtgtgcaccgtggtcccagctactcaggaggctgaggtgggaggatcatttgagcctgggaggcagaggttgcagtgagccaagaccgtgccagtgcactccagccttgggtgacaaaagcgagacctccatctcaaaaacaaaactataatcccagcactttgagaggctgaggcaggtggatcacctgaggtcaggagttcaagacaagcctggccaacatggtgaaaccttgtctctactaaaaatacaaaaattagccaggtgtggtggtggacacctgtggtaccagctacttgggaggctgaggcaggagaattacactacgcctccttcgggaggcggaggttgtagtgagctgagatcgcaccgttgcactccagcctgggcaacagagcaagactctgtctcaaagcaaacacatttatagtcttctgtttctagagactggaagtccaagatgaagatgtccacaggtgtgactccttctgaagcttctctcctttccttgtagacagctgtgttttccctgtgtgttcacacagtctcctccccccgccccagtgcatgtctgtgtcctaatctgctcttcttacaaggaaactggtcatgttggattagggcccacgcatatgacctcatttttacttaattatttctttaaagattctatctccaagtatagtcactttctgaggcagttgcggggcaggacttcagcatagacatttgtggagaggacacagttcagcccatagcactcaagtgaggtgtgaatctcacagcaccaatagaacaggagaggccgggcgaggtagcttacacctgtaatcccagtgctttgggaggcctaggtgggaggatcgcttgggcccaggagtttgagaccagcctgggcggcataacacgatcctatctctacaaaaaaattttaaaattaaatttttttaaaatttttttatgggcatggtgtcttgcacctggggtccagtttactcaggagactgaggtgggagatcgcttgaggctaggagtttaagaccagcctgggcaacatagcaagaccccatctctacaaaaaataagaaaaattagtcaggcacgtgatggcacacgcctgtagtcccagctgctcaggactttcaggtggaaggattgcttgagcccgggaggttgagactgcaatgagctatgatcatgccactgcactccagcctgggtggcaaggtgacaccctatctcaaaaaaaaaaaaaaaaaagaaaaaggaaaagaaacctctctggggcacagatatacagccagccacatgagtaatctgaggcaaaaggggctgtgggagcccatatcacatctaatccacccagactgggggcaatcagggaaggcttcctagaggaggcagcatttgcatagagaatgaaaatgaagggggcgaagggaagggaggggagggcagagcagaagccaaggccagagaatgcaggaggcccctgaggagctggaggggagggtactgacctgcaacccaatctgagaaccacgtggaggttctggtgaggccatggtgagggttttggtccctgctgaggccataggacatcatagacagggtctgagttgggacaggtagggacccatgtctcatgttggcagtgaaattctcactgctggagtgggtgcctggggagggggcagagggtggggaagcatcctcttcagaggtagagcctctcttaccgcctgtgctcaagcgatcctcccacctcagcctcctgagtagctgggaccatgagtgcacatcaccaagcccagttaatcttttaattttttgtagagactgggtctggctatgttgcccaggctggtctcctgggctcaagcgatctgcccacctcggcctcccaaagtactgggatgacaggcgtgagccaccgtgcccggcctctctcctgattttgaggtcacagatccttttgagaattcagggaaatctaaggacactcatcccagaaaaactgcacacacaatttgcaggtgggggctaaggaaaatgcagccccctctgattcagcagttccacaattaggatttatcggaatctcccaccagggcagggagatggatgaggagagttgtgaaggggatgaggtgtggggaagaaagtgggtcggctgtggacccctggggtccgcctgccctggatatgcctttgcagggcctcagcagggacgcgttttaacttacgggaggtgcagggagtgggagggaggtggttttaatgtttaaaacttaagctcaaggtcgggcacagtggctcacgcctgcaatcccagcactttgggagggcgaggtgggaggattgcttgaggccaggagtttgaggccagcctgggcaacatagcaaattcctaaatatatgtatttttgagacaaggtctcactctgttgcccaggctggagtgcagtggtgcgatctcgattcactgtaacctctgcctcctgggttcaagcgattctcctgcctcagcctcccaaaaagctgggatcacagacgtgcgacaccatgcccagcgaatttttgtacttttagtagagatggggttttgccatgttggccaggctggtctctaactcctgggctgaagacctcccacctcagcctcccaaaatgcaggaattagaggtgtgagccactgtgcccagccaatctctacaatactctttttattttattttatattatattatatttatttatttatttattttttggagatggagtctcgctccgtcgcccaggctggagtgcagtggcatgatctcagctcactgcaacctccgcctccccggttcaaccgattcttctgtctcagcctcccgagtagctgggactacaggtgcgtgccaccacgcccagctaatttttgtatttttagtagagacggggtttcaccatgttggccgggatggtctcgaactcctgacgccgtgatccacctgccttggcctcccaaagtgctgggattacaggagtgagccaccgcgcccggccaatactcgttttaataaaaattttaaaatgtattcacgcctaactgggtagttacttgatacaataaatgatcttttctagattaagaaaaaagaaaaaaaaacatttaaactcaatttcctgggaagccgcagttttgcgccgggagtggcttgtgtaggcacgcgctgcgaacgccagggggcgctgcggcgcaatttcccggtttctttgatcttccgcgtctgtaactggagatgaggtgacccgaattagacacgacggggaagtaggtcaggggttattccgtggttctcagcggagacaaaagtctgttgcttaaaccgcctctgcctctgctccttacttatacccaggtgatgcaatgtcttcacactaaaggcaaatattgagtctacaaatatttatgtgtccctgtgggcggcggcagctgacaatatcgggtcctaacgagcacgaagtcaagctccctctgcacgctttatgcagatcctcaaaaccctcctgtgaggatcgctggagcctaggagttcgaggctgcagtgagctatgattgtgcctctgccctccagcctgggtgagaaagcgagaagttgtgttaaaaacaaaaaaaaagttggggggccgggcgcggtggctcacgtctgtaatcccagcactttgggaggccgaggcgggcggatcacgaggtcaggagttcaagaccagtctagccaacatggtgaaaccctgtctctactaaaaatacaaaaattagccgggcgtggtggtgggcgcctgtaatcccagctactcgggaggctgaggcaggagaatcgcttgaaaccggaaggcagaggttgcagtgagccatcatgccactgcactccagcctgggcaacaagagcgaaaccctgtctcaaaaaaaaaaaaaaaattatcctttgagatcccttcccccaagtccatttcccatctcatggtgaacctggctgctgttcttcaaacacaccacactgtccctgccccagaacctttgcacctgctattcccatcatccgcaatgctgtgccttgcaagctattgtactccttcctccttcccttccccagctgggagaggcccctgctttacttccttgtggtatccccacttagggtgctttctttctggttctcttctggtaccgaggaatgatcctcattctggatttggcaggttgcttcctctctccccatccctgccccaatgtttaccctataaatggcttagaaccacatgctctattggaataagggtcagttgcagccagaataatatcatgctggtagggccgggtacttcctggtacatcacatcagggggtccataacgtcatgtcactacgattgatgggtgggtttggggaatgtccctggtccccagtaactctccacataaagatgttaacaggagctgggcccagtggctcacgcctgtagttcccagcactttgggaggccaaggcaggaggatcacttaggcccaggagtttgagaccagcctgggcaacatagcaaaaccctgtctctactaaaaataaaataaagaccgggcacggtggctcatacctgtaatcccagcactttgggaggctgagatgggcggatcacttgaggtcaggagttcaagaccagcctggccaacatgatgaaaccccgtctctaccaaaaaaccaaaaattaaccaggcgtggtggtgcacacctgttatcccagctactcaggaagctgaggtaggagaataacttgaatccaggaggcggaggttgcagtgagctgagatcatgccattgcactccagcctgggtgacagagtaagactctgtctcaaaaaataaataaataaaatacaacaaaataaaataattagccagatgtggcagcaattgcttgtagtcccagctacatgggaggctgaggtgggaagatcacttgagtccaagaggttgaggctgcactgagttatgatctcggcactgcactccagtttgggcgatagagtgagaccctgtctcataaaaaataaaaataaaaaaggaaagaaaagaaaaaaagtcattagcagccatcaattttgttgttgttattgtttgtttgtttgtttttgagatagagtttcgctcttgttgcccaggctggagtgcagtgatgcaatcttggctcactgcaatctccacctccagggttcaatcaattctcctgcctcagcctcccaagaagctgggactacaagcatgagccaccatgccaggctaatttttgtatttttagtagagacggggtctcaccatggtggccaagctggtcttgaactcctgacctcaaatgattcacctgcctcatcctcctaaagtgctgggattacaggcatcagccaccgtgcctggcccgccatccatttttgattcattactctcttgaggattatgtccaactttatcattcctgctactggaattagctgtggttcttctgaaaaaggctttctgcttccctccggaactagctggtttgtacagaaagtgacaacgtgatacattgacttatgtattatttgtggaatgccttgaggcaagcggttacatgagctcagcagaagagcctggaatgggcacagccctgagggtcacgtgtggctcccttggaagcatctagggagcacccaggaacgattggctgccatagtaattactatctaatttattagatatagtaaaaataaatttattactaattatcactaacgattctgattactgggtgagaacaatggtgatctcatgtatttatgtgcattacagggtgagagttctccttcctgtggcgtgcaggagattctagaatagaaactcattgaaagagtgagaggaaaacatttgtgatcttgaacctgttccgcttaaaaatacatgagggaggccgagtgcggtggctcacgcctgtaatcccagcactttgggaggccgagttgggtggatcacctgaggtcaggaattcgagaccagcctggccaacacggtgaaacctcgtcactactaaaaatacaaaaattagccaggcatggtggcgggcacctgtaatcccagctactcgggaggctgaggcaggagaatcacttgaacccagggagtggaggttgcagtgggccgagatcatgccactgcactccagcctgggtggtacagcaagactctgtctcaaaataagtaaatagataaatcgattaataaaaaatacatgagaggacgggtgcagtggctcatgctggtaatcccagcactctgggaggccgaggtgaaaggatcatctaaagctgggagtttgagaccagcctgggcaatatagcaagacccctgcctctacaaaaaatgtagctgcacctggtggcacacacccagctacttgggaggctgaggcaggaagatcacttgagtctgggaggtggaggctacagtgagctgtgattgcaccactgcactccagcctgggtgacagagcaagacctcatctccaaaaaaaacacaaataacaaaaacgtgagggtccagagaaattaaagctgcgggctgggccagcagcagtggtggtgggatggtgaagccagcgaccctagcagagaaatcggggacaaaggaatcagtgctggagacctgcagaggaggcgtcctggacccagacaggaaaaggaggtgatgtaactcaacgaagcaaggaaatctcgtggaaatgagtaaggtgacaaagagaggccacccagggggagacccagacattgagggtagcttcccttttattttctgtaaagttgctcaaaaaccttaaaacacagttgaccaacagctgctgccaagaacattgtgaaaaggtttctgggtaaggaaatggccctgcgaatgggaaggttccgctctggtgggatcagagatgaggtgtccagggctgggataggcaggccaggatagcaaagccctggcagacagaggctccattttgggtgtccttcattcccttcttttttttttgaggcggagtctcgccctgttacctaggctggagtgcagtggcgcgatctcggctcgctgcagcctctgcctcccgggttcaagtgattctcctgcctcagcctcccaagcagctggcattacaggcatgtgccaccacgcccggctaatttttgtatttttagcagagacaggctttttccatgttgcctaggcaaatctcgaactcctaatcaagcagtccacccgccctcagcctccttcattcacttctgagatgattcagtttctgtctctgttggcagctgggaaagttctgaaaaaagaatgaagagcagtccaggcgtggtggctcgcaactgtaatcccagcactttgggaggctgaggtgggcagatcacctgagcttgggagttggagaccagcctgaccaaaaaggtgaaacctcacctctactaaaaatacaaaaattagctggaaatggtggtggatgtctgtaatcccagctactcaggaggctgaggcaggagaatcgcttgagcctgggaggcagaggttgcagtgagctgagattgtcccactgccctgcagcttgggtgacagagtgagactctgtctcaaaaaaaaaaaaaagaaaaagaaaaagtaaagacaatggcatcagacaaattctggctctgaaatctaggctagctggcctggtgactttttttttttttttttcatagagatggggtcttgctatgttgcccaggccgggttttgaatttttggcctcaagccatcctcctgcctcagcttcccaaagtgctgggaatataggtgccccactttttttttttttttttgagacagagtctcattctgtcacccaggctggagtgcagtggcgcaatcttggctcactgcaaactccacctcccagattcaagcgattctcccacctcagcctcccgagtagctgggattacaggtgcccaccatcacacccagctaagttttgtacttttggtagagacagggtttcaccatattggccaggttggcctcgaactcctgacgccagatgatctgcccgcctcggcctcccaaagtgctaggattacagacataagccaccgtgccctgcccttttttttttttttttaagagtctctgtctgtcacttaggctggagtgcagtggtgcaatcatagctcactgcagccacaaactcccgggctgaagcaatagatcctcccccttcggcctcctaagtagtggctgggattacacgggcatgccaccacacccagctaatttttaaaaagtttttgtaaagacgggggttttcctgtgttgcccaggctgaactcaaactcttgagctcaacggatcctcctgccttggtctcccaaggagctgggattataggcgtgagccactgtgcctggccctggtgaccttttgacagtagccccgccttccccagcgtgggttttgccctctgtaatgttgcgtagggctgttgcgatcacagaaggtggtggagtgtgagtacttctggggtacttgccggaggctggggatttgtggaggtgtgtggctcagttttattccaggaaaccgtggccagacgggcctgtcagcaccttccctttcatctacagttcctcaattgggggggtgtgagttgtttcataagcccctccccctcatttcttgcaggaaagtggtaatgcaaagaaacttttattttatccacatctatattctttgtaaccttttaaaataagatacttggcctggcgcctgtaaccccagcattttggcaggctgaggcaggcagatcacttgagttcaggagttcaagaccagcctggccaacagggtgaaaccccacctctactaaaaatacaaaaataagctgggcacggtggcgcacgcctgtaatcccagcacttttggaggccaaggcgggcagatcacctgagttcgagagtttgacaccagcctgaccaacgtggagaaacccccgtctctaataaaaatacaaagttagccgggcgtggtggcgcacgcctgtgatcccagctactcgggaggctgaggcatgagaattgcttgcactcgggaggtggaggttgcagtgagccgagagggttagggttagggttcaggaggaaggaaaaacctagggtgtttagccccggaaatctctcttttgatgttcactgcctcgaggttcttgctacctcttgctccaagtcacagcctggccccagcaggtcatgccagagcccccagcctgtcctctgccaagcggtggtcctggcagctgcttagactcccactccgaagctggatcatctgtagatgggaagtgtttgcataaatggggccaaggagtgctctccagctctttggtaaagaagcctgacagccgccaaggcttttacttttattttccatccttcacccgggaggggaagcaagtatcactgtgttctgatttggcagagccacctgtcattgcaacttgtcaccagggcaacaagtcaccatcttagtaaggcagccaatgagaagcatgggtttcctctggtggtcggtttcacagaacggcaacagtttctaggcatccgagtgataccagaactctttgttcaaataaggcttcaaggacagatgtatagtgacagagaggagaacaagctggtagcaattatgaattttcacaaggaaaactagttgtggggagcagaaaaatcctctctgtggcttcaggaacaaagaggccatttcccttgggtctttaggaaaccccttttttccaactataatttattttattattattttttgagatggagtttcgctcttgttgcccaggttggagcacaatggtgcgatctcggctcactgcaacctctgcctcccgggttcaagcgattctcctgtcttagcctcccgattagctgggattacaggcgtctgccacaatgtccggctgatttttgtatttttagttgagacagggtttcagcatgttggccaggctggtctggaactcctgacctcaggtgaacttcccccctcggcctcccaaagtgctgggttacaggcgtgagccaccgtgcccagcccagcgataatttaaattacaagtatttggcccggcattagtggtgcatgcctgtaatctctgcactttgggaggtcaaagaccaaggatcctggcaacatatgagaccctgtctctacaaagaagaatcaattttttcaattaactgtgggtggtggtgggtgcctgtagtcctagctactcaggaggctgaggcaggaggatcgcttgagcccaggagttggaggatgcagtgagctctgatggcaccactgcaccccggcgtgggagatcgagacagagtgagacgccatctctaaaaaataataataaataaataaatacgtatttggtggtgatggttacaagatcgtgtgcagaattttagtgtatataaatgccaccttaataaaaactgatttttagaaaataattcttgggaaaaccaaaacgtgcagcaggcaggtagacacatttgtcaaaatgcatcaaactcagtaacagcagaccaaagactgcctgttctcacttataagtgggatctaaacttcaggtactcatggacataaaggtggcaataatgaacagtggggattgccagggaggggtgaggaaaaggggcatgagggttgaaaatctaactgttgagtgctgtgctcaccatctgggtgacagagtcgctcataccccaaacctcagcatcatgcaatatactcaggtaggagactggcacaggtatcccctgaatctaaaataaaagttgataaagagggtcccgggcgcggcggctcacaactgtaatcccagcactttgggaggccaaggcgggcaggtcgctttgaggccaggagttcgagaccagcctgggcaacatggtgaaaccccgtctccactaaaaatacaaaaattagatgggcgtggtggcgggcacctgtaatcccagctacttgggaggctgatgcaggagaatcgcttgaacccgggaggcggaggttgcagtgagctgaggtcgcaccgctgcactccagtttgggcaacagagcgagactccgtctcaaaaaaatgaaaaaataaataaaagttgataaagagggctggccatggtggcttatgcctgtaattccagcactttgggaggccaaggcaggcagatcacttgaggccaggagtttgagaccagcctgggcaacatggtgaaaccccatctctatgaaaaatacaaaaattagttgggcgtggtggtgtgtgcctgtggtcccagcactttgggaggccgaagtgggtggatcacttgaggtcaagagttcgagaccaacctggccaacatggagaaaccctgtctctactaaaaatacaaaaattagctgggtgtagtggcgcgtgcctgtggtcccacctactcaggaggctgaggcaggagaattgcttgaacccgagaggcgaaggttgcagtgagccgagattgtgccactgcacgccaacctgggcaacagagtgagaccctgtctcaaaaaaaaaaaaaaatttaaaaagttgaaaaagaaaaacaatgcatgaaaccaaacacataagataggcacattctactgtatgtaaattacacatcaacaaaatggatttttcaaaaatcactgtttctgggattttattagatagcatttggtacaaaattgaggtcagtagagctcagttttactggtagaaatcagaggaagttaaaggattttatgttttagaagagaattaaggggcatattgccttttcctgctactgaaccaagagttttcaaactgggtccctagggaaccctagaggttccatgcctaccctgctttctcctcaatctgtcatcacagctgcccactccttttgtgtcgttcaaaaggttttacccgaagagttctgagaacaaagggtttgaaaatcagagctctcaaaaaatgatttttctttttcttctttttttttgagacgggatcttgctttgttgtccaggctggagtgcagtgatgccatcatagctcattgcagtctcagccttcctgggctcaagtgatcctcacaccccagcctcctcagtagctgggactaccagcatggaccaccacacccagctaatttttttccattgattgattgattgattgattgagaccaaggctcactctgtcgcccaggctggagtgcagtggtgcaatctcagctcactgcaacctccacctcctgggttcaagtgattttcctgcctcagcctcccgagtagctgggattacaggtgcccgccaccacgcccatctaatttttgtatttttagtagagacggggtttcgccatgttggccaggctggtctcgaactcctgacctcaggtgatctgcccaccttggcctcccaaagtgctgggattacaggcgtgaaccactgcgcccggctttttcccttttatctttgtagagatggggtcttgttatgttgtccaggctggtctcaagctcctggcctcaagcgatcctcctgcctcagcctcccaaagcacaaggatgacaggcgtgagccactgcacctggcaataacatggtttctgtctcttttcaagctaccctttgtccagggtgtgtcaaagagtagctcaagaagagacagaagtcatgtcttcaaggaggcaggatgagctgggacttgagcatggggaaatatctggacaaaaacggacttgaaagttcctgctaggaccagaagagacagggagcctgtggaattcacttttcccctctagatcccctgtcccacaaatttgctttcagttcctctaaatacacacactccattctgcctcaggtccttggaacatgcagtcctctccctccacccagaaggccctccctaactgcctctcctggttaacccttctgcatcctccaccctcccttcaaacatcttttcctccccccaaaatactttctggattcccccatgtggggttgatttttaggtcagaggttctcacggaaaagggttcctctccttgggagatggaagggtccttgaggctgatggctgattgagcattctattggtgttttttgttgttgtttttttgttttcttttttttagagatggggtcttgctctgttgtccaggctggagtgcagtggtgcgatcatagctcactgcagtctccaactcctggactcaagcggtacttctgtctcagcctcctgagtagctgggactacaggaagccaccaccatccctgcctaatgttttcttacgttttgtacagagggagggtctcactgtgttggccaggctggtcttgaactcctgggctcaagtgatccacccacctcggtctcctaaagcactgggattacaggtgtgagccatggcgcccggacttttttttttttttttgagatggagttttgctttttgttgcccaggctggaaagcaatggcacaaccttggctcaccacaacctccgcctcccgggttcaagcaattctcctgcctcagcctcccgagtaactaggattacagctacccacctggtgtgccaccacgcctggctaattttgtgtttttagtagaaaaggggtttctccatgttggtcacgctggtctcgaactcccgacctcaggtgatccacccgcctcggcctcccaaaaggctgggattacaagcatgagccaccgcgcctggcccattgcccggcctttttattgctgttctgttggtgtctgcctttccctgactgacaagggccaactcgtcccgggcaagggcagcatccctctgcttcttagtgtatgcatggtgtttaacacagcatatggaacataatagttgctcaataaatattgcctgcgctttgaacctgtgtgcaccgttgcatttacacagggctttaatacacatgcatcatgttgattgaaatataaatacatagagaaaattgtgcaaatgagagttacagctgaaaacttttacaaaattcccccctcactaggggccttcctggtatgcttttatcaccactatctctgattccccaggactcttccatcgtcatttccgacagcataaattagttttgtttgtatttcatttattattattatcattattgtgagacggagtctctctctgttgcccaggctggagtgcagtagcatgatttcagctcactgcaacctccacctcttggttcaagcgattctcctccctcagcatcccgagtagctgggattacaggcacctgccgctacacctggctaatttttgtatttttaggtatttttttttttttttgagacggagtcttgctctgtcgcccaggctggagtgcagtggcgccatctcggctcactgcaagctccgcctcccgggttcacaccgttctcctgcctcagcctcccgaggagctgggactgcaggtgcctgccaccacgcccggctaatttttttggatttttagtagagatggggtttcaccgtgttagccaggatggtcttgatctcctgaccttgtgatccgcctgccttggcctcccaaagtgctgggattacaggcaggagccaccgcgcccggccccctttttttttaataaatggatttgtatggtatgttctttttggggtctggcttctatgctaacatatgttcgtgagaatcagccacatggttgggtgtagctgtaatccatggacagttgtctcattctcactcatcaccacataccaggggtacaaaaaaatgttttctgtaacgagtcagatagtaaacattctcagctttgggggccctactgtccaaccactctacagctgctgagctctgccatggacatgtgatagcagtcactgatgatatattaaaaaatggggccaggtgcagtggctcatgcctatagtctcagcactctgggaggccaaggcgggcggatcacttgagatcaggagatcgaagccagcctggctaacatggcgaaatcccatctctactaaaaatacaaaaattagccggacatggtggcgcacctgcctataatcccagctactcgggaggctgaggcaggagaatcgctttaacccgggaggcagaggttgcggtgagccaaggtcgtgccactgcactccagcctgggtgacaagagcgagtctccctctcaaaaaaaagggggtagcaaactgtgtgtgtgtgtttgtagggacaggatctcactatgttgctcaggctgccctcaaactcctgggctcaaacaatcctcctgctttggtctctcaagtagctaggatgacaggtgcctgccactgagcttggcaattttttttttttttgagacagagtttcgctcttgttgcccaggctggagtgcaagggcaccatcttgactcactgcaacctccacctcccgggttcaagcaattctcctgcctcggcctctcaagtagctgggattacagtcgcgtgccaccacacccggctaattttgtattgtaagtagtgatggggtttcaccacattggccaggctggtcttgaactcctgacctcaggtgatccacccgccttagcctcccaaagtgctgtgattacaggcatgagccaccgcacccagctgacaatgttttaagaaaattttctttatggactttttatgaaaattatatgaatttgaattttatatgatttctattttcactaaacattacaaatattttttggctaggcacagtggctcatgcctgtaatctcagtgctttgggaagctaaggtggcaggatcttttgaggccaggagtttgagaccagcctgggcaatagagtgagaccccacctctacaaaaaaattaaaaaaattagttaggtgtggtgacacatgccgtagtcccacctactcaagaggctgatgagggggggattgcttgagcccaggagtttgaggctgcagtgagctatgattgcaccattgcactccagcgtggaaaacagagccagactgtgtcttttttaaaaaaaaaacaacttttttttccctatggtttaaaaatgtgaaaattggcagtgcctcaaaaagttaaacatagaattaccatatgatcaggcagcactactcctggacatacgcccagaagaattgaaagcaggagctgcaaacagatatttgcacatctatgttcagagcagcattattcacaatagccaaaaggcagaagcaggccaggcacagtggctcacacctgtaatcccaggactttgggaggccgaggcaggcggatcactccagatcaggagtttgagaccagcctggccaacatggcaaaaccccatctctactaaaaatacaaaagaaaaaaaaattagccaggtgtggtggtggcacatgcctgtaatcctggctactcggaggccgaggcaggataatcacttaaacccaggagtcagaggttgcagtgagccaagatcgtgccacttgcactccagcctgggtgacaagagcgaaactctgtctcaaaaaaacaaaaaacaaaaaccttttagatccgccatctgtggtggagccgccaccaaaatgtagattttcctgaaaacccttacagggaagaccaccaccctcgaggctgaaccctcagatatggtagaaaatgtaaaggccaagatccagggtaaagaaagaattcctcctgatcagcaaagacaagcactggaagatgggcgtactctgtctgactacaacattcaaaaggagtctcctcttcatcttgtattgagaattcgtggtggtgctaaggaaaggaagaagtcttttttttattttttttgagatggagtctcgctctgtagctcaggctggagtgcagtggtgcaatctcggctcactgcaacctctgcctcccgggtcccagttcaagcaattctcctgcctcagcctcccgagtagctgggattacaggcacgtgccaccacgcccagctaatttttgtatttttagtagagacaggatttcaccatgttggccaggctggtcttgaactcctgacctcgtgatccacctgcctcggcctcccaaagtgctgggattacaggcctgagccactgagcccggccagaagaagaagtcttacctgcaagacgaataagcacaagagaaagaaggtgaagctggctgtcctgaaatattataaggtggatgagaatggcaaaattagtcaccttcgtcgaggttgcccttctgatgaatgtggtgctgcagtgtttatggcaagccactttgacagacattattgtggcaaatgttgtctgacttactgcttcaacaaaccagaagacaaataactgtatgaattaacaaaagacggccaggcgcagtggcttacacctgtaatcccagcactttgggaggccgagacgggcggatcacaaggtcaggagatcgagaccatcctggctaacatggtgaaaccccgtctctactaaaaatacaaaaaaattagctgggcatggtggcgggcgcctatagtcccagctactcgggaggctgaggcaggagaatggagtgaacccgggaggcggagcttgcagtgagccgagatcgtgccactgcactccagccagggcaacagagtgagactccatctcaaaaaagaaagaaaacccacaaaagacgtgaactaacaaaaacaaacaaacaaacaaaaaaacaaaacaaaagctggaagcaacccaagtgtccatcgatggatgaaggaataaacacaacgtggttcatccacacaagggaatgtgatacagccatggaaaggaaaacagttctgactcaggctacagcagggatgaaccttggggatattatgctcagtgaaataagcagatacaaaaggacaaacactgtgtgattccactcctaggaggtccctagagtcatcagatccatagaggcagaaagcaagatggagggtgccaggggctggggagagggatagggagtgagtgtttcatggggacagagtttcagtttggaaagaggagaaagttctggagatggacggcagtggtggctacataacaacatgaatgtgcttattgccacagaattgtgctctgaaaaatggttaaaataggctgggcatggtggctcacacctgtaatcccggcactttgggaggctgaggcgggtggatcacttgaggtcaggaatttgagaccagcctggccaacatggtgaaaccccatctctactaaaaatacaaaaaattagccgggcatggtggtgcacgcctgtaatcccagctactcgggaggctgaggcaggagaattgcttgaacccaggaggtggaggttgcagtgagccaagattgagccactgtactccagcctgagcaactgagtgagactctgaaacaaagaaacaaacaaaagcaatggttaaaatggaacaagatggtgcatacctgtagcttcagctactggggagtccaaggtgggaggattacttgaagccaggagtctgacactagcttgggcaacatagcaagaccccgtctcaaaaaaaaaaaaaaaaaggccgggcacggtggttcacgcctgtaatcccagcactttgggaggccaaggcgggcagatcacaaggtcaggggatcgagaccatcctggctaacacggtgaaactccatctctactaaaaaaaaaaaaatacaaaaaattagctgggcgtggtggcaggcgcctgtagtcccagctacttgggaggctgaagcaggagaatggcgtgaacccaggaggcggagcttgtagtgagccgagatcgcgccactgcactccagcctgggcgacagagcaagattccgtctcaaaaaagaaaaaagtaagttataatggtaagttgtatgttatatgtattttaccacaaaaaggcccgttgtactggaaacaaagaacaaataaaaatgtaataaccattccaagctcatgggtggtccaagaagaaacatgagctggaccttggcccatgagcaatggctttccaacttctgttgcaggtgatgccattgatggaataaaccatgatttttctttcttctttttgagatggagtcttgctatggtgcccaagctagtcatccaggatggagtgcaggggcacgatctcagtgcactgcaacctccacatcccgggttcaagtgattctcccacctcagcctcccaagtagctgggattacaggcacacgccaccacgcccagttaatttttgtatgtctaatggagacagggtttcatcatgttggccaggttggtctcaagctcctgacctcaagtgatccgcccgccttggcctcccaaagtgctgggattacaggcgtgagccaccggccataaaccatgattttatttaccagttctattgctcatgggcatttgggtatgaatgtggtatgtcattctcacccagagacataattattattactattttagagaagtggtcttgctctgttgcccagactggagtgcagtgctgtgatcataagtcactgtagcttcgaactcccgggctcaagcaattctctcacgtcagcctccttagtagctgggactacaagtgcttgtccgcaccatgcctagcaagaggcattaattttgtcatgtttgcatcagccacccttgcatgcaaaactctgcttgtctacctgttcctcagaccacagcccctggcattatccctggggcaccacctcctgaccagtctctggacatgaagacggaggccctgttggaagtgggaaggctcccttcctcctccagcccttactgtctgctcaggggcttcctcttggccccggatgtgggaccggagggttgggggcccagggacttattagccaagccaggaagccccaccccaagaggcctcaaagaaagagctgcggtgcaggaattcgtgtgccggatttggttagctgagcccaccgagagggtaagtgacagctgctcctgcgcttgccatggcaccagcggggaggctggggtcaaggctgagcctccatccctgtcccccacatggggggacaggggtccaggtccaggggcagatcctactccctccatgggccggatcttccccacagggcagggctgatccagctgtgggtctcttggttccctctttcagcgcctgcaggatgaaagctctctgtctcctcctcctccctgtcctggggctgttggtgtctagcaagaccctgtgctccatggaagaagccatcaatgagaggatccaggaggtcgccggctccctaagtgaggaccccccacttgggcaagctccccaagggtctcagagacctcactgatccctggcacagacctgactccaacccagccccagcgctcaccaaatctcatcctcaaatccaaccagatcataaattcaaccccaactccactcccaacccctccgactgtccccaccttatccacggctccaaacccaatccccgctctcactccaaaccttcccttactccaaaacacccaactcaagacagggtcctggaggccagtgagctcctatgcccacagggacctagctccaaaccaacagggctaggggaggatgggggagggaccgtttggtctcacagctccccctgtctcctttcctcctgccccccagtatttagggcaataagcagcattggcctggagtgccagagcgtcacctccaggggggacctggctacttgcccccgaggtgagtgcaggagactgttgtccaggcgcccatttctgttccaagtcccctgggaatgccccctccccgccacgttccccgtgtccagcctctactcccctaggatcttggtcctgactcccagccttctccgcccaccatctggacactggtgtccaccctcactccctgcctccagtgcccattcagtggttggagcctccagccgtccccgtccccacccccgcccccccaacccccctccgcgctccccacccccctcccgctcccaccctcagcctcccagctcagagtccacgctcctgtgttccgggctgcaggcttcgccgtcaccggctgcacttgtggctccgcctgtggctcgtgggatgtgcgcgccgagaccacatgtcactgccagtgcgcgggcatggactggaccggagcgcgctgctgtcgtgtgcagccctgaggtcgcgcgcagcgcgtgcacagcgcgggcggaggcggctccaggtccggaggggttgcgggggagctggaaataaacctggagatgatgatgatgatgatgatgatgatgatggagcggatctgagccctgcgtggtttctttagtaggcccggagggactgatctagcgtctccaagagagtggggcgcgtagctgctggagggggcggggacaccgcgactttctactgccccatcgcccttcctcctatggggtctccaactgcttcctccgaaaatagggcctgaacttcctctagtgacgtccccacccaaggctcatggctgccttcaagaggtgacgtctcatctttgaggctaccttgacgctcaccctggggtctccgacctccccaggaagtggctgggtccttttcccccagtcctcataatgaggcttcatcgaggacctgggtcagtctgggcagtggacgggaccctccagggccccaagactccaggagccccaggtcagggtggaaccctgaatcatgtctcagcccagagctggaacctgtacccctcacttcctacctgcaaggaggaatccccaaggcacaggcaaagttgggttacggagagtcagggacgcctacctgacgtcacgcatcatcacaagctcacgttttcacacaggcaagtgcagttgtgagtagttagttacaaccagatacacgcagggtgcttaccccttcctggatactagattatgaaaacacagagcaggggacttgtctgctcctagatcccccccagggtttcgtttcttcccttcccttcccctcccctcccctcccctcccctcccctcccctcctctcccctcttctcttttctttctttctttctttttttttttttgagacagggtctcgctctgttgcccaggctggagtgcagtggtgcaatctcggctcaccgcaacctctgcctcctgggttcaagcgattctcctgcctcagcctcccacgtagctgggactacaggcgctcgccaccatacctggctaatttttgtatttttagtagagaaggagtttcaccatgttggctaggttggtcttgagctcctggcctcaagcgattcacccgcctcagcctcccaaagtgctgggattacatgcatgagccaccgcgcctggcctattttttaatttttattttcgagacaaggtcttactctggcgcccaggctggagtgcagtggcacaatctcggctcactgcaacctctgcctcctgggttcaagtgatattcctgccttagcctctcaagtagctgagattacaggtgcccaccaccatgcccagctaatttgtatttttagtagagagcgggtttcaccatgttggccaggctagtctcaaactcctgacctcaggtgatccacccacctcggccttccaaagtgctgggattacaggcatgagccactgcacccagcgcccccagggtttagaatagagcatggaacacagtagacgttcagtaaatgtctgttgatcagtagccacatgtgcacttagatacagcaccgacgtgcacatactgcacatgcacacacagctatacacagccacgtgcacacacagagtacacaacccacctaccacggccacatggagacaccacatccacagacacacccatgtgcccctagacactcttggacacagaaaggcaccacccccccggccaatgcacggagaatcgcagatttgactatggtgggcagagatgatgcaggacacaaacacacacatgctccaggcagactcttgcatttctgactctagtccccactgcacctggataagtatctgataccctagtgcagcgatccccaacctttttggcaccagagactgttttcatggaagacagttggtgtgtgtatggggtagggggggagcggggatggtttctgggtgattcaagcgcattacatttattattcactttatttttattattatgacattgtaatatagaataaaataattctacaactcaccataatgtggaatcggtgggagccctgagcttgtgttcctgcaactagatggtcccagctgagggtgatgggagacagcgacagattaccaggcatttgattcttataagaagtgagaaagctacatccctcaaatgcgcagttcacgatgggattcttgctcctatgagaatctaatgctgctgctggtctgacaggaggtggagctcaggtggtaatgcgaatgatggggagtggctgtaaatacagatgaagcttctctcgctcgcccaccactcacctcctgctgtgaggccccgttcccaatgcccggtggctggggacccctgttctagtgggcaaaagcctcagcatcccccgcctcagctccctggggcacaaattcaggtgattcggggtccagttctacaggaagcctgacccaggagtcttgccatccagtccctgatttcccaccacagacttcagaattcctagcacctagtcttgaaagggatcccagactcaaatgtcacacctggacaacagatgatagagtgaggttctggtttgcaggatgttttggactctcctcccactgccacccaccccctgtgatggtcccagccccctgtctgatgctggtggccatgagcagagattacaaccacttctggtgccagggaccccacccagactccagcccagggattcccttcccagaccctctctcctgactccacagtggtcatgggggtagggcaggaccactgagttagaagcatggccagggccagagagggtgagtctagtgccttgtgtgtgtccctgccccttactgctgtgtgtgtgtgttgggggcggggatgctccattgtccccagaactatttgtctccacccccatccaatagtcctgtatctgaaacctaagagggctctcttcaggttcctcaattccaacatagacattctcctgccccagagtgcagacttggaggtcatatctgcccaggtgatgtggacaggcaaaccccctattagagcctcaatttcctcaatagctaatgcctagatcccctgtggtaggcaagatatcctcctccctcctccctcctccctccctccttcctcctcctcatccttctcctcctcctccttcttcttcttcctttttgagatggagtctcactctgttgtccaggctggagtgcagtggcacgatctcagctcactgcaacctccacctccaggttcaagtgattctcctgcttcagcctcctgagtagttgggattgcaggcgcccaccaccactcctggctaatttttgtatttttagtagacacggggatttcgccattttggccaggctggtctcaaattcctgaccttaagtgattcacctgcctcggccttccaaagtgctgggattacaggcgtgggccacagagaccagccaaggcaagattcttctgcttgcaagtacaacagaccccacttcaaactagcttgggcaaaactaaaaggaagtttcttgtttgtgtaactgacaagcccagggttagaacaacaggttcaggtatggcttggaaccagggtctcaaatgatgtctccaggacccagacttcctctcgggtctgattttctcagcactgcctttgctctcaagtaaattcttccctgtcacagctcccattacatcctcccattgtggcagccctagtgagggctggaaaaaaaagagaatgctttttcccccgtggttaaaccaataaaaatcccagaccagcgtttcattggctggatcttgctcaaatgcccgcctctctgcccaatcttagactctggttggctgggtctggatcatttgtccactgtaaaccaatccctagcttatggtttgctggatctagcacacattttctttcttaaaagaaaattgagaatgttaccctatgaaagggacgggtgctggtcaggcagctttgcagatgtttcccacatgacatgattgcttgtgggcctctggtttagcgtgacctttttctcaaaggaagtccagagcctggagccgcgtctcagccccacccaagcccgggaaatgtgcaacgctgtggctccaccccctgtgcctgtccatcaaggcagagcccacatccaattggtccgtctgctccattagaaggcggtcctatagctcagtaactgacttctttctaagaccaaatggagcagctggcatgaagtcattatcaaattgatctttcttggagacacaggatttggcaatattttaggaaacagaactttatcctcaccagatctcgacgctcatttctcaacattcaagttgtctgaaatttaaccacatatttttaaccaaaacatcatcactttctgcacataagacagtcttatacttgttttttcttcttttcttcttccttccttccttctttcttctttcttcttttttctttttttttttttttttttgacggagttttgctcttgttgcccaggctggagtgcaatggcgcgatctcggctcactgcaacctccacctcccgggttcaagtgattctcctgtctcagcctcccgagtggctgagattacaggcgcctgccaccacgcccagttaatttttgcatttttagtagagacagggttttatcatattggtcaggctggtgtctctaactcctgacctcaggtgatccgcccgcctcagactcccaaagtgctgtgattacaggcgtgagccaccacacctggccagaaaaaaataaaaataaaaatgtatgcctgtaatcccagcactttgggagaccaaggctggaggatcagttgaacccaggagatcaagaccagcctggacggcatattgagaccctcatctctacaaaaaataagaaaaattagactgggccacggtggctgatgcttgtaatcccagcactttgggaggccaaggcgggtagatcacgtgaagtcaggagttcgagaccagcctgaccaacatggggaaaccccgtctctactaaaaatacaaaattagccgggggtggtggtgcatgcctgtaatcccagctacttgggaggctgaggcaggagaatgacttgaacctgggatgcggaggttgcagtgagctgagatagcgtcattgcactccagcctgggtgacaagcacaaaactccatctcaaaaaaggagaaaaattagccaggtgaagtcgtgcccacctgtaatttcagctactcgggaagccgaggacgaaggattacttgagccagggaggtcaaagctgcagtgagccatgatcacgctgctgcaccccggcctgggcaacagagtgaaaccctgtctcaaaaaaaaattattaaaaaacatttaaagagacagggtcttgctatgttgctcacgctggtctcaaactcctggcctcaaatgatcctcctacctcagcctcctgggtagctgggactacagagcgagccaccatacccagctactttgtgccttttgtaaccccagttttcaagatcagataaacacaaagtgaactaagacaccttctagacagagtgcgggcatgtgaacgcatgcttgtgtctatttttctgagtgtcacaatgcaaatagtatgcaaatgagtttgtgatgtgtgtccgtgtgcagacctgtgtgtgtacatgtgtgagagagagtatctgggtagataagcagatggatggatgagaatgagaaacctggagtttccaggtgcagaggaaactgttcctccagggttcttttttgagacagagtttccctcttgtcacccattctggagtgcaatggtgtgatctccgctcactgcagcctccgcctcccaggtttaagcgattctcctgcctcagcctcctgagtagctaggattacaggcgctcgccaccacgcccagctaatttttgtatttttagtagagacggggtttcaccatgttagccaggctggtttcaaactcctgacctcagatgatccacccacctcagcctcccagagtgctgggattacaggcgtgagccaccgcacccagcctcctccagggttgtataaaagcaggggatttggggagggagggaaggatgtgggtctgtcctcagtcccagatgtgggtgtggcgttccagtggttagttcccgttgcctcacatctgtgcttttcctccacggggacttgtagaagtagaagaacttcttgggggtggagctgaggggtggagctgaggctggagggaggaaggtgtggggggacccaggggtcctgtctccaagcctggttgctcttacgcgaaaagttgggacactgaggtgtcacagcttctcttttgaaatggagaggaggtaggagggtgaggtccatccaggtagacacagacacacacagagaccacagcttcctgtaacatttccgagtgtcgaattccatctcccggtctagaggtttttcttcttggtccttcctgagacctcttggctcccaagagcctcttgatcggggcaggaatgagggtgccccagggtgcgagagtcgtggatccctgaaaagaggaggctgctccccctctttcttccccccacctccagatttcctcatctgcccacaccttccggtgggcggggacgtgtatggacaaatttgcgggctggggaccatggaagtggaggaaatctacaagcaccaggaagtcaagatgcaagcaccagccttcagggacaagaaacagggggtctcagccaagaatcaaggttagggaactcgaggtggaagggaggggttaagaaggagagattggggggccgggggcttttgctcatgtctgtaatcctagcactttgggaggctgaggcgggaggattgcgtgagccctggaggtggagactggcctgggcaacatagggagactctgtctgtaaaaaataaaaataaaaaaagaaggagagttcagatgggagaggtaaggggtcaaaggtgggggccgggggctccttcccctccaagatgtgtggatgtgtgtgtggatgtgtgtgtggtgtgatcactcaaactctcacacacccgctccacttaaccaaaaagcagattttagcttctcactccttatctttcaccccctacaatttattgagtgcaaagggttgggtaaaacaagatcccggatccactctccacaccacagagctctgagcagatctccaacccctcccaggtgcccatgacccagactatgagaatatcaccttggccttcaaaaatcaggaccatgcaaagggtggtcattcacgacccacgagccaaggtgagcagacacccacctgctcacatcccatcaccttgggaaggggcaggtgggcgggcaactgcagggcccccggggctgcgtggaagggaggaagcgatggggaaggaagaggtgacagctgttgacgtgctaatgaggtctgttgatgatgacaatgttggggaatgctggagagggggtctgtgatggtgacggtgttagatcgctgagggtggctggtggtggcagtgttgttgacgatgatgacaagctgcatgaccacagctgctgatggttttgagaggagcgaggtgtccatggtgttagagacagtgaggatggtttgagtggtggtgctggcccctcaaggtcactttgctgcctctttgctccagtcccagcccagtgcaggccgccctcagactccacccaggtcccctgctggttgtacagagccatcctgagcctgtacatcctcctggccctggcctttgtcctctgcatcatcctgtcagccttcatcatggtgaagagtgagtacttcttgggaggagggtgctggggggcctagactttctcccttgtccttctctctctctctccctgggtgcttcaaggattttcctgcccctcctgaacagatgctgagatgtccaaggagctgctgggctttaaaagggagctttggaatggtgagcggagggtctgagggagacccgtggggtcatggtgggggtctggagagggatggatgcacagacacccctgtttcatgccctcagtctcaaactccgtacaagcatgcgaagagagacagaagagaggctgggattccgttcagcagagcatcaccatggtcaggagcaagattgatagattagagacgacattagcaggtgcctgtgtagtctcgccttctatgggggttatttgtcaccaatgcccggagctgagctgggggcaggggattcaggggaggagaaagccggggtcctaccctcccaaagctcaagttgtggaggggcgatgggtgttaccatctgggttgctctgtgggtattgaaaggctcctgggaaccccaaatccatgggctctgctgtaccccagggtgggtgtggggcagggggggtgcttccaaggaaggtgggggctttgtttgaggctccaccgcagcttgacttatctgttcccacccaaccctccccgccccctaggcataaaaaacattgacacaaaggtacagaaaatcttggaggtgctgcagaaaatgccacgtaagttggcgccccgacaggaggtggaggagggtgggtggggcttcagatttagccccagctcctctcccaggggcgggatctgcctcactgtgggtctctccccatccccagagtcctcacctcaataaatgagaggacattgtggcagccaaagccacaacttggaagatggggctgcacctgccaacgaagacgggaaatgaccccccccccccagcctagtgtgaacctgcccctcgtcccacgtatagaaaaacctcgagtcatggtgaatgagtgtctcggagttgctcgtgtgtgtgtacacctgcgtgcgtgtgtgtgcgtgtgtgcgcgtgtgttcgtgtatgtgcgtgtgtgcgtgcgcgtgtgtgtgcattttgcaaagggtggacatttcagtgtatctcccagaaaggtgatgaatgaataggactgagagtcacagtgaatgtggcatgcatgcctgtgtcatgtgacatatgtgagtctcggcatgtcacggtgggtggctgtgtctgagcacctccagcagatgtcactctgagtgtgggtgttggtgacatgcattgcacgggcctgtctccctgtttgtgtaaacatactagagtatactgcggcgtgttttctgtctacccatgtcatggtgggggagatttatctccgtacatgtgggtgtcgccatgtgtgccctgtcactatctgtggctgggtgaacggctgtgtcattatgagtgtgccgagttatgccaccctgtgtgctcagggcacatgcacacagacatttatctctgcactcacattttgtgacttatgaagataaataaagtcaagggaaaacagcgtcgctatgggacctgttactggggcaaggggaggggttttgggacctggggagagggagagtctgcacgtgacaatgaccccggggcaccagggtgggcgagactgagtgccctgcgtgagtacctgtgcatctgtgaatgagtaactcattccctgtgtcttccctgtgtcccagagtgggtgcccctgagcatacaacatctccctgagtgtacctgggaccacggatatatacaagccctaagcgtgtacccacgtgtgtaattgtgcccgtgagtgtatctatgccattgagcatgtatccatgagtgtacatgaccctaaggtactatgtccaccgctcatgcatgcacttgatttgttgttgttgttgtttgtttttgtttttttgagacagggtctcgctctatcacccaggctggagggcagtggtacgatcatgactcattgcagcctcgacctcctgggctcaggcgatcctcttgcctccgcctcccgagtagatgggattacaggttcacaccaccacacctggctaattttttttaaagaagtgggagtctagctatgttgtccaggctggtctcaaactcctggcctcaagtgattctcccacctccgcctccgaaaatgctggggttacaggcgggagccaccgcgggccacatggatgcacttgagacaattgaacccatccccaaggacataggagtgcctggaaaagccaacaggtgtgtccatgtgcaagggtatacattggcccattgtcatacgtgcgccctgagcaggtgactaggcctgcaagcgtcccctccagcgtgggccacccagagccagcgagaccctggccacgcgcggagcagccatcacggccgtgggccacgtccctgggtccggctccgcggactcgcgcgcccccctgcggccgctctcaggcaccgctgcgcgcgccccgcccacacgcctggcccgtcgagcgcctgcgcacgcagcgccttttacggcgccgtaaagcagctcggccgagcagactgctgcggttcctggtgagaccctacccacccccctgcccgcgccgggcctcgtccgctccccggccccttccccgcgggcgtgtgggtcccgggctggggtctcggcgtccgcgatcccgagcccgctcgcttcggcccccctcaggaggctgcgaggagggtgggtttctccccagtgtagaggtacggggcgagggtcgcggggccctgaccctacggcagttcagctcacttcagcccccatcgcagcccggtggtggggtcttaacgatccctctcccatctcgcgcgcccagggccctcgccacggacggatctgcatgctggggcgggggcggcccggagcccctgggacacccctccccgctggttctcccacctcccacgcagacctcgttggggtcggcttagcatccacacacctccccatgcatggtgggggcgggttctcagctgcccctccgatcccgtctcggcgcccgctccccaccccatttctcttcaggagccccctaccccatctccctctccccgcaccgacagctgatgggaggaccacagttgctcagcatccagcttcctttctggagagcacgggggtgggaggctcccaacacctctgggcccctcctcccagccttcagaacccaggcccatccgcgtctcaaaggacgaagggttcctgcgtgacacatcggagctgcctgcctgagggcttggggttgggggttacccgcccctcctgcctggccccacggatcccccctgttaaagcccccaaccctcctggcttttggtcttgacacgctcctaccccactcccaccctccaccccctttactctggctttccgcagggggccggcaggaaagttcccgagggtcgtctgtgctggagcgcagggcggggcaggagcgactgcccatatcccctcgtggtgcctcatctttgtcacctccctgccctagatctgacgcccctccccccatacactagttttctagttactcctgtaggtggcggagcgggcaggaaggcgctttcgcaattgaaccgtctgcatgcccgagggttgggtggtttcggcctcctcttctgttccccctcgtgtctctcctcccaccttgtccccactcccgctagcccgctgcctgccgagggtataagactcccccctcccttgatttatctggttacgtgtaatcgaggcgtgttttacgcgcatctctttgcaagtgggaagtcggcactggagcacacaacagtggcatgggtcgagggtgtcccagggcccctcgcggttctccctcctttcctcccggcctgctccccttcccattgcccctgacacctgcacttcctggtctccccgcagggtggcggcggcatggaggcgcgcttcacgcgcgggaagtcggcgctgctggagcgcgcgctggcgcggccgcgcaccgaggtgagcctgagcgccttcgcactgctgttctccgagctggtacagcactgccagagccgcgtcttctccgtggccgagctgcagtcgcgcctggccgcgctgggccgccaggtgggcgcgcgcgtgctggatgcgctggtggcgcgcgaaaagggtgcccggcgtgagaccaaggtgctaggcgcgttgctcttcgtcaagggcgccgtgtggaaggcgctcttcggcaaggaggcggacaagctggagcaggccaacgatgacgcgcgcaccttctacatcatcgagcgcgagccgctcatcaacacctacatctccgtgcccaaggagaacagcacgctcaactgcgccagcttcacggcgggcatcgtggaggcggtgctcacacacagcggcttccctgccaaggtcacggcgcactggcacaagggcaccacgctcatgatcaagttcgaggaggcagtcatcgctcgagaccgggccctggagggccgctgaccctgccggagataaaggatacagagagcccctccccacgtgtgtcttgtgtcttgtgtggcggccttagatccactcagtaccttgagccacagccctgccccaggctggggagggaggccaggtccgaatgtgtttacagtagagtgggggcgggtctggccatagggttggggggttgagtgagaccaggagtggtggggagaaataaacccggcaaaaggagttggtgggaaatgctggcaggttctggaatcacggttggaggctgtctgcaggctggagggggcatggggtcctgggagacgcatcaggctgagacagacgcctttagactgggggtgggcaaactgcgcaaagtgccagatgggcaatattttatgccatgtggtctttattattattttttttatttgttgagatagagtcttgctctgtcgcccaggctggagtgcagtggcaccatctcacctcactgcaaacctccaccttgggttcacgtgattctcctgcctcagcttcccaagtagctgggattacaggtgcctcccaccacacccggctaatttttgtatttttagtagagatggggtttcaccatgttggtcaggctggtctcgaactcctcatctcaggtgatccgcccacttcagcctcccaaagtgctgggattacaggcgtgagccactgctgtgccgccatgtgctcttgccccattactccgctgatgtactgaatgcaaccacagacaacatgtaaaggagtgggtgtcaccgtgtgcctagaaaacaggcagagggagattgtttgccttcttccctcatttattatatttttcagagacagggttttgttctgtcgcccaggctggagtgcagtggcagcatctcggcttcggctcactgcaagctccgcctcccgggttcatgtcattctcctgccccagcctcccgagtagctggaactacaggtgcccaccaccacacctggctaatttttcgtatttttagtagagacggggtttcaccatgttagccaggatggtctcgatctcctcacctcgtgatctgcccacctcggcttcccaaagtgctgggattacaggcgtgagccatggcgcccagccatgcccagctaatttttaaaaaatttttgtagagatgggggctcttattaggttgcccaggctggtctcaaactcttggcctcaagcaatccttccaccttggcctccgtaagtgctggggttacaggcgtgagccaaatcaaagtgtgttctgtagatcagcagtagcagcatcaactgggagttggtccataatgcagtctcaggcccaccccagagctgctgaatctgagggtgcattttagcgaggcccccaggggattcctggggaccttagattgagatgcaggctttagggtatcagaatcaccaggaggggccacgtgcggtggctcacgcctgtaatcccagcactttgggaggctgaggcaggtggatcacctgaagtcaggagttcgagaccagcctggctaacatggcaaaaccccgtctctactaaaaatagaaaacattagccgggtgtggtggcacatgcctgtaatcccagctacttgggaggctgaggcaggagaatcgctccaacccgggaggtggaggttgcagtgagccgagattgcaccattgcactccagcctgggcaacaagagcgaaactccatctaaaaaacaaaaaggtcaggcgcggtggctcacgcctataatcccagcactttgggaggccgaggcaggcggatcacgaggtcaggagttcgagccagcctggccaatatggtgaaaccctgtctctactaaaaatacaaaaattagctgggcatggaggtgcattcctgtagtcccagctacctaattttttgtatttttagtagagatgaggtttcactgtgttggccagtctggtcaatactttaaagttaattttaaagtccaggatgatacaaacacatttcccttgttaaaaaaattttaaaataagtggggtgcagtggtgcacacctggagtcccagctattcaggaggccgaggcagaaggatcgcttgaggccaggggttggtgtccagcctgggcaacatagtgagaccttgtctaaaagaatttgaaataaggccaggcgtggcgacttatgtctgtaatcccagcactttgagaggccgaggtgggcagatcacttgaggccggaagtttgagaccaacctggtcaacatggcaaaacccatctttactaaaaatacaaaaattagctgggcgtggtggcaggcacctgtaatcccagctacttgggaggctaaggcaggaggatcacttaaacctgggaggcggaggttgaagtgagccaagatcacaccactggcactccagcctgagcaacagagtgagaccctgtcttaaaaaagaaaaaaaaagtaatgtattacacctcaggcaattttcctttccctttttgttcaccacacttggttcctgataactcctcctctcccccaaggaaagttcttccagattttttgggggaaccatgatccaatcttccctgcttcctttccaccgccccccagaatgtgaacagacaggtctgttcagaaaaggaactgcagggactgtcagctgggctcccctcactggttatgagaagggccaaaggggtcggtgtcacctctagatttgtttaggatgctctgttggactgcctggtggaccagggctgagggcttggtcagggcagtctcagccatcctagcaagaggcattgagcagggtgggcttcagcacactggggagaaggtggcgtctctaggatgaatgaaaccattgagcaaccaccacacatagccccagggctgatcctggaatagctgttggctgttggaggtggagggaggcgccgggagagggcttgggcaggatgatagcctgaatctggaatgagggggaggcgtctagggggccagcagatgcacaggtcttggggtttggggtctggagttctggagggaggtctgggcgtctgcacagacacagaaaccacagtcctggatgggggacggagggaggggaacatggtgtctgagaagctggatttcagagcaaaatgcaggacgctttgggctaagcagccccaggcaggtcctctgagaccctggcgagaggggcttccagggccggccagggcaggggccattcttctgtccagaggcggggctgtgagggatgtcagagaaatcgggagggaggaagaggggctgcgggaatttgtaagctgggagtgcagggcccagggtctgttcccacgccccatccccaccggccaccgagggtgagttagggggcttgaggagaagggaaaacgtttgaacaagctgtagggttatgaggctgggcccggggttggggcaagggaggatgaagagaaagaagagcctgtggttcggcagcttctgatcacagcagctctaacttacggtgctctgggctgcaaggaaggtcttcccctggaccctccaggtgggtgggtgagaggaagaggaggaggaggagccaggcaccagcccttggtgagctgggcaagcagcatcagctcatttcacaggcaggttccaaaagaagtcatgtgcccatggtcacacagattaattattattattattattatttagagatggagtctcactctgtcgcccaggctggagtgcagtggtgcgatctcagatctcagcctcctgggttcaagcaattctcctgcttcagcctcctgaatagttgggactataggcatccgccaccacacccagctaatttttgtatttttagtggagacggggtttcaccatgttggccaggctggtctggaactcctgacctcaagtgatctgcccgccttggcctcccaaagtgctaggattacaggcgtgagccaccgcacctggctggctttttctcttttcttcttctttttttttgagacaggttctcactgtcgcccaggctgagagcaggggcacaatcctcccacctcggcctcccaagcagctgggaccaagttgcccatcactacacctctagtttttgtattttttgtagagatggggcctcactatgttgcccaggctggcctcaaactcctgaactcaagcagtcctcccacctcagcctcccaaagcgctgggatgacaggcatgagccactgtgcgcagctggctttggccttttatctgagctggaggaaacttctggaaagggggcagtgaagagagagccccgggcggaggtgactgctccagtcgaggcagtggcagaaggggtgagcagtgagtgattgtgagcgccgtttgacagcagagcccactggcatttcttatggtcttggacctggaggtgttgtcaggggaaagggaagaggtgcaatgaccccagtgttggcctgagccactggtagaggagtgtggagaggggaccctgtgctcctggcctccctcccgtggcctccggcatgggtcgaccttggccgagcgtgaggctggtgccacctcagcctcccagaccctgagtagggttaacacctccagacccgaaatggcctccggttgaccgggcccactccccatcagcctgtccagccagccagcacttactgagtgccttctgtgtactaagccctgctctgggtacttccatgagtcaactcacgccctcccggcctcagggtgatccaccgccttcccctacagtattccaaggggccattggacctcagaggcttcatgtcctgcacattctccgtgtcatagagcaggaaaaaataaaaacgggagatcgaattctacttcagttgctcctcaatttgtttcttttttcttcttttttttttttttgacatgcaatctcactctgttacccaggctggagtgcagtagcacgatcctggctcactgcaacctctgcctcccaggttcaagtgattctcctgcctcagcctcccgagtagctgggattataggcacatgccaccgtgcctggctaatttttgtattttttttttagtagagacggggtttcactatgttggccaggctggtctcgaactcctggtctcaagtgatcggctcaattcagcctcccaaagtgctgggattacaggcatgagccaccacatctgcttgctcccaattttctttctttctttttaaatttatttagttggggtctcgctctgtcacagtggcgtgatctcagatcattgcaacctccacctcccaggttcaagcacttctcctgcctcagcctcctgagtagctaggattacgggtgtgcaccaccacgcccagcgaatttttgtgtttttgttttttttttttttttgagatggagtctcgctctgtcgcccaggctggagtgcagtggcgcaatctcggctcactgcaagctccacctcccgggttcacgccattctcctgcctcagcctccccagcagctgggactacaggcacacgccgccacgcccggctaattttttgtatttttagtagagacggagtttcaccgtgttagccaggatggtctcgatctcctgaccttgtgatccgcctgccttggcctcccaaagtgctgggattacaggcgtgagccaccgtgcccggctgaatttttgtatttttaatagagacggggttttgccatgttggccaggctggtcttgaactcctgacctcagatgattcgcctgccttgacttcccaaagtgctggaattacaggcatgggccaccacacccggccaaagatctgatgtcccaactttcaaaggtggtctcaggcatcagactctggaattcccagctcccatgtgccacacccagagaccagacccagccaggcctccaagaaggggacaaatgtgggaggccatcactgccccattttattgatgcaggctggacaggaggactcaccacctgagctggggatactcaggtcctggggtgctgaggagatggggctgcatctggagagggtgctgttggggtgtactctcatctggagagggtgctgttggggtgtactctcatctggagagggtgctgttggggtgtactctcatctggagagggtgctgttgggggcactcccatctggagagggtgctgttggggtgtactcctgggaaggcaggggccatagaggagcgggagatgtgtcagctgcctccgtttgggtggcagaaaatgtcacagggacctttcagccacaaagaggcttttaggccgtggttgggggtcttcagggtcttgctctgggcctggctgtatccatgctcaagagtggagaggggcagagggggtgggcaggcggccgtcagggtctggtcttgaatcaggtcccatggactccgcggaaccttcgctggctggcggcgtgcatgtggccagccggtcgcacacccaggcgcccagcttacggtcgcagaaggcgtcgttccagcgaccggagccccgcatcatcacgcagtcctcgccctggctccggctggtgggctcccctggagcccagttgctggagcaaaaggctttgggtcaggggatggggcggggagaaggagcccagttcccggcagccctctgagtctgcaccctcccttctcaccccaggttccccatcctgagtctgtgcctggggaccggtacctcattttggtgccccataccctgcagcccaagactcacccttatttatttgtttgtttgtttatttatttattttgttgagacagaatcactctgtcgcccaggctggagtgcagtgcgcgatctcagctcactgcaacctccgcctcctgggttcaagtgattctcccacctcagcctctcaaatagctgggattacaggcgcccgccatcatgactggctaatttctgtatttttagtagagaggggtttcgccatgttgaccaggatggtcttaaactcctggcaggtgatccacccacctcggcctcctacagcgctgggatgacaggcacgagccaccctgcccggccaagactcacccttctaatctgtgcatggaacttcctccctgagccccttcctctatatcccctcctccaggtcagagaagccttggccaggtcccccagcccccactggcgtccttctcccctgcaccctagagacccttatctctgagccctcatccgctttccgatgcagtttatctagggagctcctccctccacggtatttccatctcctcccctggatcccagaggccccctcctcacctgtagtccacgtggctcccatccacccagataaactcccccttcaggtccaagttccgaaggccaatccaggagccggtgtggctggcatgcttggtcaggaagtcctgggggacaggacagggctggaggactggagacatgtgcccggggccttccagcccacttcgagaggttgggtagagtggggtgggggtccccccaccctcgccatgctgcccaccacctctgcagagccccagcccacctgctcctccgggctgtggatgctgaccagctgcccttccatgtcgtcacaggcataccgggcgtggacccactgcttggtgcccttgccgaagtagtagcacttccgttggaaattgatccacttttcagggcacgtgttgcacacaaagcctggggtggaggagaggctcgggggtggggccaatggaagtgccttgggcaccctgggcagactaggtggcagcacccctcctagggccactcctggggtcccggctaaaagcagacccaccccagggcctaacagacagcctcacgggctgtgttctctgctggagctatgatgctgaccagatccatagtagaagcacctcagccaccatggccacaaacaccttcatggttagcagagcacggtgtcgaccatcaacacctcaactaccatcagcatctccacaaacacctcatggccagaagcaccacaagcaccaacactgccaccacacattcatgtccaatatggtcaacaccatgaccacaaacacactcatgtccaacaacacttcaaccaccatcaccacagacacctcacggctagaggtccctcaaccaccagcaccatgaccacaaatgcattcacgtccaacaacgcttcaaccaccattatcaccacagacacctcacagctagaggcccctcaaccatcaacaccatgaccacaaacacactcatgtccaataatatttcaaccatcgtcataaccacagacaccccacaggtagaagcccctcaaccgtcaacaccatgaccagaaatgcattcatgtccaacaacacttcaaccaccagcatcatcgctacaagcaccaccatggccagaagcacttcagttgtcattataatcaccttaaatccaccacggcttgggaactcttcagtcaccaaagccatgaccacatcaccggctccacagccagcagcacctcagccacaaatcccatcatcacaaatgcttcacagcgagcagagcatcaatcaccaacaccatcgccatcgacagctcatagaagtgcctcaatagccaccaacatcaccataaatccatccatggctagcaacacttcaatcaccaacattatcacccacatcaccagttccacagccagcagcacctcagccacaagcaccatcaccaacagcactttcaccaccctcatcacctcaaacacctcatgccagcagcacttcaaccaccaacaccagcaccacaaatacctcatggccaaaaatgccaccaacaccatcatcacaaatgccttacaggcagctgaatatcagtcaccaacatcatctccacaaacaactcctcaaccaccattacatcatcataaatacacccatggccagcaacacctcagtcaccaacaccatgactacattgccagttccacagccagcaacactgcaactgcaaacactgtcaccacaaacacctcccaactagaagcacctcaaccaccagcactatcaccacaaatacattcatgtccaacaacacatcaactaccaacaccattgtcacacattcacattcacgtccatcaacacatcaaccaccaacaccatcagcacgaatacattcacgtccaacaacacatcaactaccaacaccatcaccacgagcacattcatgtccaacaacacatcaactaccaacaccattgtcatgaacacattcacgtccatcaacacatcaaccaccaacaccatcagcacgaatacattcacgtccaacaacacatcaactaccaacaccatcaccacgagcacattcatgtccaacaacaaatcaactaccaacaccactgtcatgaacacattcacgtccatcaacacatcaaccaccaacaccatcagcacgaatacattcacgtccaacaacacatcaactaccaacaccatcaccacgagcacattcatgcccaacaacacatcaaccaccaacacctttgccacaaacacattcatgtctaacaacacatcaattaccaacaccagcgccacgaacacattcacgtccatcaacacatcaaccaccaacaccatcagcacgagcacattcacatccaataacacatcaactaccaacaccagcaccatgaacacattcatgcccaacaacacgtaaacccctaacactgtcaccacaaacaccttacagccagcagaacgccagtcactaacaccatcgccatcagcacttcgtggttagcaacacctcagctgacgccaatgtcaccacaaacacctcatggccagaagcagctcaaccaccaacaccgttattataaatacattcttgaccatcaatgcttcaactgctgacaccattaccataaatacatccatggccagcaatacttcaatcaccaacaccatgaccagcagcacgtcagcggccatcactgtcaccacaaacaccttcatatccaataacacttcaaccaccatcatcaccacaaacacctcatagccaacagtgcctcagccaccaaccccatcatgacaaacacctcatggccagcagcacttcaaccaccaacaaacccctccaaggtcagcaacaccttcatcaccgacatcattaacagaggtacccaccaccagcagcagcttatctccaccacccacaccacagccaacaccatctttaccaaccacaccagccgtgtcttcatcactggcaccgacagcaaaaccagtgctgtggccaggtccaccagcgattactttccccaagcaccatccctaccaacagccctggtcatcatcactggcagaacccgccaaaccagcactcctagccaatgtctgggaaattgtgatgattttcttccagtgggaggctttggtcaggagagccaatgggattgcaagactaggtcccacaatccctcaatatggtctctttctccccttccccccaccgcagtgaaactcccagacattgttgctatcgcctcccaggtggaaggttaaacccactcttactggatcaaatctttcttgcttcaaaatagattttcagcagtggtgtgcacctgtaatcccagctacttgggaggctgaggcaggaggatcgcttgagcccaggagtttgagaccagcctgggcaacatagcaaaaacccgctttaagtaagtaggttttcctatagtgatatgcagggaaggttccactacacgtggtcagatgttttttgttttgttttgttttgttttgagacagagtcttgctctgtctcccaggccagagtacagtggcgctatctcggctcactgcaacctgcacctcccgggttcaagcaattctcctgccttagcctcccaagtagctgggattacaggcgtgcaccaccatgcccagctaatttttatatttttagtagagacggggtttcaccatgttggtcaggctggtctcgatctcctgacctcatgtgatccacctgcctcggcctcccaaagtgctgggattacaggcatgagccaccatgcccagccacagatttttttttttttttttttaaagaggcagggtctcatcatcttgcccaggccagtctcgaactcctgggctcaagtgatcctcctgcctcggcctcccaaaatgctgggattacaggcgtgagccaccacgcccaccctcacatggtcagatttttctaaggagcttagggtctgcagtagcttgagatgagtgtgcttctcacccatgaaatggtaaccagtactcagccctctggaggtgcagcgttaaaacaggaagaggtggccaggtgcagtggctcatacttgtaatcctagcgatttgggaggccaagatgagaggatcacttgaccccaggagtttgaggccgtagtgagccatgattgtgccactgcactccagccttggtgacagaaccaggccctgtctctgaacaacaaaaacaacaacgacaaaaacccaaaccccaaaaccaggaagaggacatttctgagccctcaaagaaaacttcaggggaaggtgtcttggttgtttgttacatagtcacccagagacaacctcagagccaggctcagatcccaggctgtggggctggatttcggggagacttcagggactggggaagaattaggaggtgacctgtcagaagttgtcatggtccagagtgctcttcccctgtgcctctccctgagggaccacactgaggtttctggctgggattcccaaagccacttcacatcccaggggatgggactccatcacaccaagcacagaaacttcctcttctctgccccagttagggcagctggggcttcccagaggtcaaagaccaaaaatcaagggtgggggcattagctggcggaacggcagggctgtaaaaccccagttcctaccgtacagtaattttttttttcttcagaggcaaggtcccactctgttgcccaggctggagtgcagtggctcaatcctagctcaccgcagcctcaaactcctgggctcaggtgatcctcccacctcagcctccggagtagatgagactacaggtacacatcaccacatctggctaattttttcatgtttttgttgaggcaggatcttgctgtgttgcctaggctggtctcaaactcctggactcaagtgatcctcctgcctcggcctcccaaagtgctgggactataggcgtgagccagtgcacctggtccctaccccacattaagggtacagtgactgaatgtctgctctctctgcagcctgctagcctcctgaggtcaacactgcctccattactgccacccctgggaaagaggccaccatctccattgtcccatcactgcagacattacccccgtctggctccctgccctggtcagacaatctaccaggaaggctatgtgtatgagaatcctactaataactcctcactgggccacatcaggcagaggacaccagcaaggagaacccagcgagggtcaacactggactgctttaacgcagaagaggaaaaaaattgtaggagtctccaaatctgtgaaaggacacagttggaatcagaaagaaattgccaggcaagatggctcatgcctgtaatctcagcattttgggaggccgaggcgagaggattgctggagcccaggagttcaggaccagcctgggcaacatagcgagatcctgtcgctacaaaaaataaaaaaattagctagggccaggtgcaatgacttatgcctgtaatcccagcactttgggagactgaggcggaatgatcgctggagtccaggagttcaagaccaacctgggtaacaaagtgagacactgtggctacaggaaaataaaaaattagcctggcgtggtggcacacactcgtagtctcagctactctggaagctgaggtgggaggatctcttgagcccaggagttggaggctgcagtaagctatgattgcaccactgcatttcagcctgggcaaaagagtaagactccatctctctcttttttttttttttttttttttttgagacagagtctcgctctgttgccctggaatgcagtggtgcgaagacagcatgatctcggctcactgcaacctctgcctcccgggttcaagtgattcttgtgcctcagcctcccaagtagctaggattacgtatgcccgccaccacacccggttaattttttaaaatttttattgagatggagtctcgctctgtcgccaggctggagtgcagtggcgtgatcttggctcactgcaacctccacctcccgggttcaagcaattgtcctgtctcagcctcccgagtagctgggactacaggcacgcaccactacacccagctaatttttgtagttttagtagagatgggggtttcatcatgttggtcagactggtctcgaactcctgacctcacataatctatccgcctcgacctccctaagtgctgggattacaagcgtgagccaccgcgtccagctaatttttgtatttttagtggagacggggtttcaccatgttggtcaggctggtctcgaactcctgacctcaggtgatccacccgcctcggcctctcaaagtgctgggattacaggtgtgagccaccgcgcctggccaagaccccttctcttaaaaaataaaataagcggtgttttatgtatgctctgtgtgtcctgccccatcagaaacttagtcctatttccgtcatcacgcacacctctgcctcgcatccaagcacactccccaccctgcgcttatatctttgtgtcctcccgatgacactcgggtcacacaaacgtatagacatgctgcctcacgtcacacgtgcgtgccgtcacatttgccaacacgcccgagccccaggtgaggtcacgcgtcgtcctgagcagagactcacacactcaccgctggacacctgcaactccatccttagctttgtcacctcctcccggagtctttccagcaaatctgaagcttcgttcctctcgttcaattcttggggagtcaacaaggggcggtgctcagagaccaactggcaggccccctccttgtccgttccctcccccactgccccatcccctcccaagcctcaccctgggacttgaagctgctcagatctgcttgaagcccgttcaggttccaggacagctccaagtctggtgtgtgcaggagcgcagggctggtctcagggaggatgtgtacaggccgagggtgccccccaagcctggccccccagcctcgtggttccccagggctctgagacactccctccttcccacccaatctggcttcataaccccgatcccagtctctcaccctgagatttcaatctctgctgttcagctcgaagttcctccagttcctgtgaaatctgcgtggctgtttgcaggggagggggcttcatggtaagcaggtcctcattgtctcccccatctacccccacccatcccttggtctctttgcctgggttcttggaaccacctgctcagtttgcagttcccgggtgtcgggggtggggcacagtgagtcttaatgctctgggtccaggaagtcatccaagaccccctcgctttttcccctgcaaccccaactccaggagtcactcacactgggatttctgcgccatctggtcaccgtggtggctttccaagttcttggaaacttgagagactggagcggcgggagagaagagatatcccaggaacctcaaaggcaggtccttggaccccgcctatgccccaggctcagggaccctctcacatagtcacaacagctgctgttgctgtttgttcatttactggagcaggaggagtgtactcaggaaggtatatgcaagaatataatgaactactgtgtacctctccctcacccagggttaactataaaagcagtaggcgactatcagggtacttcacaaatcttagagcttgtttctgtctcacggcactaaaagtatgcccattttacagatgaggaaatggaggcacaaagcagttacaaaatccttacactacagatgcttaaggctgccaacttacaatggctcaacttacaatagctcgagttacaatggctcgactttacaatggtctgaaaccaatatgcgtttagtggaaaccttaactctcttgcaatgctgggcagtggtagggagccaaagccttcagccagccacacagttttgacttaaactattttcaacgtactttgcgcttatggggacataaccccattgcaagcggaagagcatctgtattaggatgctatcaggcacttttccaagcttccctgggtccccgccttccctaggacagggagcaacttagtttgaccttcagttccttagcgaggggacactgaggcccagagaggagcgggatgagtgctgggcatcctaaccctcacccccaccccctccaccttgaccccttcataccgttccgggcagccctctcttccagctgttttagactctgtgtggtgtcccagtctggggagggggagagaagaggagtggagaggggggattgtcagtgcccccacctgcctgcaccccacctcccagctggggatggaggtcttgggtataagccatggaggtgctgaaagtgtggaggacagggatgctgggtgtggggtgaggggctctggagggtgggggatgggaaagggctggcagtggcaagatgggaggcaggatgggaaaattgggttttgagaggatgcgttgggctcccccagctctgagatgggggtgaaggagggaacacagaagggccccatgagttggggggaccacatggagctgggggtgtcctcacgccacaggagaagcagagtcagcagcccagcccacagagcggcggtcaccagccccagcagcacgatctgagtcccacgcctgcaacaccgcctcctgggaagctcctcgatctctgccgggggtggagggactgactatgggtgcagggtgaagctggatgctggccctgtccgtctctccattacccagagcccccgacagcctgggagcttgtccagagcccacactgaagcaaagggtctcagtggacccccagctccatttgcacagcttccttacctgactcagggctgggtcactgaccacagagacagatctgggactaagagctaagactccctcagccccaacaaccaatgccaggcccccagcttcacttccagaagactaggtcctgctttttccttcccctctgagccccaacgcccacccttacacctctgcacctgtccccaacctggagtcccttccctaaacccaggacactgagtcccagttcttccccaacatcggagccactccccagccactttcccaggtgtcatccaacatccagacctccaaacctctcccagaccccacccaaaggtctatctggatgtcccacctcaagcccctggccctctgcactcaccctggcttggaggattcattatgctaaattctgcttgttccaagttcctgttctatttggcctctgactctattgggctccccgctccctagctgaagccgtttttttttttttttctttttctttttttgtcaggagggtgttgaatcagaaaaaggaggggccctcaatttgccactccttcctggctctgtgccaggaaagtcagtccggcctcacctccttactcacaccagtccctttcttagaaattcaccctctttcccagagagggactggggagccccgcttctcttctgggtgaaaggcagtagctaagggtcattgcttctgccaacgttagaaccagagagtcctcctacctgaatattgaccttcctccatggcggtcctgcttggattctcccgatgatggagcactcactccctgacaacgcagtccactcagcgggcacaatcacagctctggctgatttgggatttaatgatggttagggtgagccatcaaatcctagttaccagcacaggatagcatctgggacttggtggcactcaggggccatttgctgattttgtttagtctacaatctggactcactagcgtggttagcagggagacacagctggtgtggagagatagcagcctgagatcagaagtggggcactccagagcccatcacacttgagctacacagcaggtgcacccatgagatcttgacaaatggcttaattaacctggaaacttctttcctcattcgtaaaatgatgataccaagaacacctatactgttggttggtgatctgtgctaaaaatatcaccagcgtttattataattgccttgcctgtgtgacctcagccaaggattcaaccattctcagcctcagttttcccctctgtaaaatgggctgatgacagcacccaactcatgaggccaagataggatccaatgagatcacagcatacctgaggtttttggtgccgggctgcgcacagtgggtcttcggattctaaacatttatgaaacatctactctgtgccacgtcccactgagaaatgctaagagcccataacccaggcctcagccttctcctctgccaatgtccccagggcatctgtaaagtgctctgactttatttatttatttatttatttattgaaatggagtctcgctctgttgcccaggctggagtgcaggggcacgatctcggctcactgccacctccacctcctgggttcaagcgattctcccgcctcagcctcccgagtagctgggactataggcacgtgccaccatgaccagataatttttgtatttttagtagagacgggttttcactatgttggccaggctagtctcaaactcctgacctcatgatccgcccgcctcggcctcccaaagtgctgggattacaggcgtgagccactgtgcatggcctatttttttattttttgagatggagtctcgctctgtcacccaggctagagtgcaatggcaccatcttggctcactgcaacctccacctcccgggttcaagcgattctcctgtcttagcctcccaagtagctgggactacaggcacccaccaccacacctggctaatttttgtattttagtagagacagggtttcaccatattgatcaggctggtctcgaactcctgaccacaggtgatctgccctcctcagcctcccaaagtgctaggattacaggcgtgagccactgcgcccgaccaagtcctctgactttaaagcatctactatgtgctgaggagcatgggacttggggtccttcaggcctggaggtcacgggctaccttctttcgctgcttgactataggtaagtcccttctctcggagcctcagggaggtggggtgtggcgcggccaggctctgattagcggcagctcaagctggcccttttgacattgtgagaggaacccagagaccatcctgggactggaactgtccagggaggcagctggacagacctgagtccgagtcctggcttcttcctggatgagcagctcagtttgctcatctgtaaattgggagtattcaaagcaccagcacacagtaggtgctcagtaaacctactggcaggatgctgggggactgtcctcattctgtggggcctctctcagtggaactgaggttccaagagggtaagtcatttgtccccatcacgcagtggtgggactggaactcaaacccgggacccttgagctgggagcccatttgctcaatcatctggagacataatctcatggtggggtgtctactggtaagtgctgggtggcaggatcccaactccaggccgtccttctaacccaagaggtcctgcctctgcctagagtcttccatggctccccagggccctctatgatcggcccagcgcactcaccaagctcatctcagaccagatggcctgctttcacttccccaaatcagggactcgaatgcctcgagattctgtccacactgcggcccccacccccgccccctcaccacccaccacctcccttctctggttgtgacctcctgctggtcatcccttgaggctcagcccaaggtcgtttcttccaagggcgctttgatctccacttcccatggccaacccccaacacaccagatacgtactcacttagtggagtttggagcctgtgtctgtcctcctagtgtgttggggtcgaccagagcgattggcagggaccgtcagagacagaggtttaagcaggaagagagacactttcttctgaaagtagagccactgacagcttctattttcatagacctaaatatgggcttgccacccggataacattacacgcatggcctctcctggtgctccccacacccgggtgaagtccgtgttattattatctccatttctcaggtaagagaattgggtgagaactagagatgttaagcagcaagttcccacagggctgaaggaggtgagtggtagcgtcaagatgtgaaccactgttactgcacactgaatcataccactatggccgatcacagagggccctggggagccacggaaggctctaggcagaggcagggcctcttgggttagaaggacggcctggagttgggatcctgccacccggcacttaccagcagacaccccaccatgagattatgtctcttgatgattgagcaaataggctcccaggtcaaatgtcccaggtttgagtcccagcaagaaaaaagggaagaggagagagaggcagaggaaggggaaaaaaaagacagaaggaaggagagggagaaggaggagtaggagggaaggagggaagcggggggaaagaaagatacgtgagataatattcaggtcaaatatggacagttttggctgggcacggtggctcacgcctgtaatcccagcactttgggaggctgaggtgggaggatcacttaagcctgggagttcaagaccagcctggacaacatagcaagccgttgtctctacaaaaactataaaaactagcagggcatggtggtgcatgcctgtgatcccagctactggggaggcagaggtgagtggatcacttgagcccaggagttcaagatcagcctgggcaacacagtgagatgaaagaaagaaagagagagagaaagagagagagagagaccgggcacagtggctcacgcctgtaatcccagcactttgggaggccgaggcaggtggatcatctgaggtcaggagttcaaggccaacatggtgaaaccctgtatctactgaaaatacaaaaaaaaaaaaaaaaaaaaaaaaattagctgggcatggtggtgggcacctgtaatcctagctactcgggaggctgaggcaggagaatcgcttgaatccgggaggcagaggttgcggtgagccgagatcgcgccattgcattccagcctgggcaacaaaagctaaactctgtctcacaaaaaaaaaaaagaaaagaaaaaagaaagaaaaacagaaaagaaacaccaaactccatcccagccccatcctggaactaagacttcatccccatgtcctcacaacatggcccagctggacttattcccaagcttcctcctccttctcctcgtgtgtccccattggtgggacagtccgtccatccacccagacaccccggcccaggtccaggccttgtccaagcacttcccgatcttccaccccaccgctcacccagcacccgcgcctggctcgtctcaaaaaaataacctgcttctccccatccccacagctgctccctcttccccctggaccaggtgacatccccctcttagggttccccctgcctggtttgccttgtccctgggactgcctcctccatggcctccccactctcatcctgcccccatgacagccttccctggggctctacctcctgtcttgccccccaaaacagaccctccagggtcctcactcccacctggccaccacggcagacccccccttaggatccccaacccgacctgccctcaagactaatcccccagtgaccccaccctggcttggcctcaaatgctgtccctatgtccactcagcagcccccagccacctctccaatgctcagcggccaactctttcccttcctttttgattttttttctttttttgagacagagtcttgctgtgtcatccaggctggagtacagtggcatgatctcagctccccataacctctgcctccccggattcaagtgattctcctgcctcagcctcccaagtacctgggattacaggcacgcgccactacacctggctaattttttgtatttgtagtagagatggggtttcaccaagttgaccaggctggtcttgaactcctggtctcaagtgatccacccacgtcggcttcccgaagtgttgggattacaggcatgagccaccgcacccggaccctccctcacttctttaccatcttggtcctcggccattaccccagatcaaggtggaggggacattttgggacccaaaatgaacagcctcagaccaccagagtcagtcattcactcaacaggcatgcaccaagggtcactcggtccagggtgacagacaaggcagcatggtcccagctgttctggagtgcagggtccaggggacatttcagccaggcccctccctgacacagtgggaacgtccagccctagtggatggcccagcccagccccctcctggttgggaggtgggttgtaggggcacaggggggtgtcttctggagtgagagacatgggaggtagcccacccaggagtggggatttggagttccccagttgagagtggggagggtgttaaggatcaggggacacattttgggaaggatgaggagggtgggcaaagtgccaaggggtcttagtatatagaagtctaggtggcatagtggctagggctgcagatgcctgacccacactacctgtgttcaaattcctggttcttccattgaagtgctgtgtgacctttggcaagtcacctaacctctctgtgcttcacataaggcagcattgatcaccaaagcatctaattcctagggtggtggtgaaaattagatgtgttaatatgcacacaagtcactaagaactgtgtccggctgggcgtggtggctcatacctgtcatcccaacactttgggaggctgaggcgagtagatcacctgaggtcaggagtttgagaccagcctggccaacacagtgaaaccccgtctctaccgaaaagtgcaaaaattagccagaagtggttccaggtgcctgtaatcccagctactcgggaggctgaggcaggagaattgcttgaacctgggaggcggaagttgcagtgagctgagattgcgccattgcactccagcctgggcgatcccaaaaaacaaacaaacaaacaaattcctgtgcccagcaaccattgctactaaattaaactatacaacaaaattgtccatatttttttttagagacagggtctcgctctgtctcccaggctggagtgcagtggtgcgatctcggctcactgcagcctcaacctcctgaggttcaagagatcctcctactttctcctcctgagtagctgggaccacaggcacgcaccaccacgcctggttaattttttaaatttttggtagcgatggggtctcactatgttgcccaggctggtctcaaactcctgggctcaagtgatcctcctgcctcagcctcccaaagtgctgggattacaggcatgagtcactgtgcccagctggaatttggtgtttctgagttctacaagcccaggtgccccagcccaaccccaccggccccatcatgtccttcccaggggtgaaagccccctgcctgctgggttcctgccaagactcagctcaaacactaggatgctttggggccccaaggacccagtcacgggactgccccacccgcttcccctctgcggtattaatacgcctcttgctcacttcgggggaaaaacagaaaattgtgcggatgtgggccccagatctgtgggtgtcggttcttctttcagatttgggatcctctgcatgttgggggaggccgcgtctcgctcctcgtttgacctaggtcagaattcaacaggaaggagtttagggtgtccagcaacaacaaccctcaaccatctccagctgagctctcatcccagccccggccctgaccgtaaccccagctcaactacaacttgatcccctcaccccacgatgctctgatcccagccctaacctctgctctgcacaggacggaggcacgtccgcggctctaatcacagaacccccacacctgggacagggcctggcgctgtgtcccaacgagatggagcctggcgaccctgactctaaccccatcccgacacagccctgggctttcctacctgtttaacctctcctggggttacgaaggggagaaggaaagggtgcaggggtggggaggaagggcagtaggtgtgtcaaatccaggggggcttccaggaggaggtgtgttcaaagctgggtctctcccaccctgcactgttgactttgggactgatgattcctcgctgggatgctgtcctgtgcattgttggatgtttagaagcatctctggccactagtcgccgaaagagtcaccgtggttgagaagcgctgctttgaaaacatgattcctagatcacgctttattttgttttcattgtggcaaaatatacataacataaaatttaccatcgtagccatttctaagtgcaccattcaggagcatgaaacacattcacactgttgtgcaaccattaccaccatccgtctccggaactttctcatcttcccaaactgaaaccgtgtccccatgaaacactcactccctatttacccaactccagcccccatgagagctccccttagggtcctcacccccaccagaccttcatgacagcctcctttagggtctccctgaaacccctcctctgtgtcttccctgaacggcaaccacctgcccatatcttctctctgcctacaaccatccatggctcccttctgccctgggcccaaagctccagcttcccatgtcctggagttcaagggtcctgcctgctcaggcctggcagctggtctctccagccacgcccatacctcttcctccaagactccacagagtgccttaacttcacacagttctgaaacaccaggctgtctccaagccttcgcacgggcagctgctgcctaaagtgctgagccaacccacagcaccaatttgtatggaagcctccctgccacccatagtcctaaggccccctcttttcccagccttgagctcctgcactggatgggcccctcctgggactgggggctccccaggggcaggacctatgccccactcctagaagggccaggagggcggccctgaatcacagtcacatgcacccctttccctccgcttccggacccccactcaggcagagagccagtcaacaggaagaggaaaggggtgtgtgggatgagaagagcctggatgtgcacttttgtcttccgggaacctcgggatctggagcccaaacctaggctgtttttttggtgtggattgtggcagtggggtggggagagcttgggggcactggtatgtgtggctgggagtcctcaggctaagaggggacgcagagatggggttgtccacacccttccctccagagggccccccagaactccaggaggggggtcctggaccactcattgcctccctgccccctcccctcaaggccccaggatacttctagggaccagagagctgagccagcaggtcctgaggcttctgagagcagcccaggcccagcctgggagatttggggatttctttccaagaacgccctcagagactctgaaatcctggactccgggctccaccctcacagacccggggcttcaacttcctggagacccaggaagccaggcccccagaccccaccctcagggactcaggctcagttccctaaggatcaggaagacaggcccccaaaccccatcttcaggaactcaaattcccagcccttcagggacccaggaggttgggactccagcctctcaatccctgagagaccaaagcctccagccccatagggacccaggaagccaggccccaagaccccatcctcagggacccaggcttagcctcttttttttttttttgagatggagtctcactctgtcgcccaggctggagtgcagtggcgcgatctccgctcactgcaacctccacctcccaggttcaggcgactctcctgccttagcctcccgagtagctgggattacagtcacccacgaccacaccgagctaatttttgtatttttagtagagatggggtttcaccaagttggccaggctggtcttgaactcctgacctcaggtgatccgcccacctcgacctcccaaagtgctgggattacaggcgtgagtgaggcttaatatcttaaagacccaggaatccaggcctccagacctcatcctcagggacccaggcccccagaccccctagggactttggtgtgggatcgtgtgtttttctcctccgtccctgctgatctcatgccggtttctgggtctgccaggacagtggcgggtgctgctgctttgctggacacacctggtcactgccaccactgtgtaacccctgatgtgggtaactaaaggccatgggttcccagcccagctgcacccctttacctgctgtgtgacttaatcctctctgggccccagtttcctcatctgtaaaatggggataacctcgtctgtaaaatctctcacataggttgctgtgtgcgtaaagccttcagcccaatgccagatatagggaggctctaaaaatgggagcatttttagtgcaatttcctgaaaaatatctctcacataattaagcagctcccaatccggcagccagcaaggccctgtgtggctgacaccttctcctctgtattgccccctctgtatgcccctccagtgacaatggcctgcctttctgttttatttttggagagatggtctcactctgttgcccaggctggagtgcagtgcagtggtatgatcacggctcactgcatccttgacctcctgggctcaggcgatcctcccacctcagcctcctgagtagcttggaccacaggcacatgccacctgcctagctaattttaaaattattttgtaggccgggtgtggtggttcacgcctgtaatcccagcacttttggaggccgaggtgggcgggtcacgaggtcaggagatcgagaccatcccagccaacatggtgaaaccccatctccactaaaaatacaaaaattagctgggcatggtgacatatgcctgtaatcccagctactcgggaggctgaggcaggagaatcacttgaacccaggaggcagaggttgcagtgagccgagatcgtgccactgcactccagcctggcaacagagcaagatctccacctcaaaaaaaaaaaaaattgttttcttgtagagacgagggtctcgctatgttgcccaggctggtccccagctaccggccttaagcaatcctcctgcctcggcttcccaaagcgttgggattacaggcatgagcccacatgtcctgctcttccttcatcttcacagccagaagcacagcctcttccaatctctctctgactctcatcctcctgcctcctcttgtaaggactctgtgatgacattgggccacctggataatccagagtgatctcccatctcaagacccttaacgtaattccatctgcagagccccatttgccatgtaaggtaaactgttcacaggttcccgggattagaatgtggacatctttggggaggtgttactcagctgaccactataccctaggagacagatgttgttattattattattatttgtttttgagaggagtctcgctctattgcccaggctggagtgcagtggcctgatctcggctcactgcagcctccgtgtcccaggttcaagcgattctcatgcctcagccttcacagtagctgggactacaggcatgcaccaccatgcccggctaatttttggtagagacggggtttccctatgttggccaggctggtctcgaactcctggcctcaaataatccacccgcctcagcctcccaaagtactggggttacaggagtgagccaccgtgcccggcccaaactctgggctttttgttggcatctgctacattcatccttttgagctgtgtctgactctggggacacgggaaaggtaagaatcctcatggggtttgggggacaggcctgacgaggagactctgtctgcccccgcttctttggagagcaccctggggacttccccacactccccagccttcctaggaagaagccctcgggatctgagggggtttcctgggatcagggggagaggggtgggaggctgataagaacagactactctgtctgaaagacatgactttggaaagtgggatcaccatggagctgctctatccaggaaaccctagctgggctccaaggtcaccagcaatttgctgaccgagccccagagagagttgccctgtggtcactcagggggctagtggtggggacaccccgtaaaaagaatcagggagtggctggaaggtgcccctctctgcctccatgccctgctttccagcacaaacccccattggtctcttcagggcagagcctactttctctccctgtaccccactccccaggccggaaatgccgtggagggggaattgcttttccagaattgttcatgtcagacctcaccacgtgggcacaccctctatctgtcctcaccacctcttcctctctctgccagactgtgggccccaggagggcagcaaccatgacctgaaccccaacatttcaccatgacaattttcttttccttccttccttcctttctatctctctttccctccctccctccttccctccctgcctcctttctttcttcctttctttcctttttctttcttttcttttcttttttctttcttcctttcctttccttaccttaccttatgttacctttcctttcttttcttttcttttctttcgtcagtctcgctgtgtcgcccaggctggagtgcaatggcatgatctcggctcactgcaacctctgcttctcaggtttaagtaattctcctgcctcagcctcctgagtagctgggattacaggcatgcaccaccacgcccagctaatttttgtattttttcgtagagatgcagttttgccatgttggccaggctggtctcgaactcctgacttcaggtggtccacctgtcttggcctcccaaagtgctgggattacaggcgtgagccaccgcacccagccaaatttttcttttttcttttttttctaattaaaattttttttttttggccaggaatggtggctcacacctgtaatctcagtgctttgggaggccaaggcaggaggatgacttgaggccgggtgttcaagaccagcctaggcaacatagcaagacacccatctctacaaaaaacaaaaacaaaaacaaaatagctaagcatggtggtgtgtgcctgtagttccagctactcggaaggctgaggtaggaggatcacttgagcccaggaggtcaaggctgcagtgagttacaatggcaccactgcattccagcctcgatgacagagtgaaactctatctcagaaaaagttttttaaaaaatatttttatttttaggactaagtttctgtctggtcggacaggacagatggggtacacataagaaggccctttcgtatttttagtagagacggggtttcaccgttttagccgggatggtctcgatctcctgacctcgtgatccgcccgcctcggcctcccaaagtgccttttttttttttttaagatggattttactctgtcacccaggctggagtgcaatggcaccatcatagcccactgcaacctcccaactcctgggctcaagggatcctcccacctcagcctcctgagtaccttgggactataggcatgtgccaccacatccagctaattaaaaaaacttttttgtttttttttgagatggagtctcactctgtcaccaggctggagtgcagtggcacgatctcggctcactgcaacctctgcctcctgggttcaagcaattctcctgcctcagcctcccaagtagctgggactacaggcacacgccaccagacctggctaattttttgtatttttagtagagacagagtttcaccatgttggccggcatggtctcgatctcctgaccttgtgatctgcccgcttcggcctcccaacgtgctagtattacaggtgtgccccgcacctggccttgttgttgtagagacaaatctcgctctgttgcccaggctggtctccaactcttagcttcaagtggtcctcacacctcaggcctcccaaaatcgtgagattacaggcgtgagcagccacgggctaatttttgtatttttaatagagaccgggtttcaccgtgttggccaggctggtttcaaactcttgacctcaggtgatccacccaccttggcctcccaaagtgctgggattacaggcgtgagccactgcacctggctgtaacttttttttttagccaaaattatgtgaacatatttgttaccagaggcaggtggtggtgggcggggtggggcggggactggggagatggtggccaaaggatacaacatttcagtgacaggaggaacaagttcaagagatctattgtacatcatggtgactatagttaataatcacatattgtatactcgaaaattactcagaaagtaggtttttgtttttttgagacggagtctcactctgtcaccgaggctggcgtgaagtggtgcgatcttggctcactgcaacttccccctcctgggttcaagtgattctcctgcctcaggcctcccaagtagctgggattacaggcaccagccactacgcccagctaatttttttgtatttttagtagagaaggggtttcaccatgttggccaggctggtcttgaactcctgaccttgtgactcgccctggcttaaggcaatacatatgttgtgaataagcttgatttggctaggcacggtggctcacacctgtaatcccagcactttgggaggttgaggtgggtggatcacctgtggttaggcgtttgagaccagcctggccaacatggagaaaccctgtctctactaaaaatacaaaaattagcagggtgtggtggtatgcgtctgtaatcccagctactcgggaggctgagacaggacaactgcctgaatccaagagggagaggttgcagtgagccaagatcacctcgctgcactccagcctgggtgacagagcgagattccatcttaaaaaaaaaaaaaagtgataataacaattagaaggaatgactaagatctactatttaatagtacagcagagtgactacagtcaataataatttaattgtacattaaaaaataactaggccaggcgccgtggctcacgcctgtaattccaacacttttggaggccgaggtgggtgggtcacttgagataaggagtttgagaccagcctggccaatatggtgaaaccccatctctatcaaaaacacgaaaattagcccagtgtggtggtgggcgcctgtaatcccagcttctcaggaagctggggagggagaatcgcttgaacctgggagacagaggttgcagtgagctgaaattgcaccactgcactccagcctgggcgacacagcgagaccctgtttcaaacacagacacacacacacacacacacaccaaaaacaaaacaacaacaagaaaaaataaaacaactaaaagagtgtattaaccgagcgtggctgtgcacacctgtattcccagctacctggggggctgaggcaggagaattgcttgaacctgcgaggcggaggttgcagtgagccaagattgcaccactgcactccagcctgggtgacagagtgagactctgtctcaaaaaataaaaataaaacataaaagaatataattggattgtttgtaacgcaaaggataaatgcttgaggggatggagactgcattctacatgatgtgataattacacgttgcatgcctgtgtcaaaacatctcatgtaccccataaatgtaatcacctgtatatacccacaaacatgaaaaacacaaaatacaaagacacatcacactgggagcaagcatttggagacaaaatactatgcactgtatgatctaatttatatgaaacttcacaagacaagtcaaattcatagtgatagcagattggtgatgacctaggtctctgtcagggctggtgctgagattgaagggcaggagggaattctagggctgatggaaatgttctatatcatcaatatcttgatggttgcccagctgtatacctttgttaaaactcactgaattggccaggcgcggtggctcatgcctgtaatcccagcactttgggaggctgaggcgtttggatcttgaggtcaggagttcgagaccagcctggctaacaaagtgaaacctgtctgtactaaaaatacaaaaattagccaggcctggtggcgggtgcctgtagtcccagctacttgggaggctgaggcaggagaatagcttgaacctgggaggcagaggttgcagtgagccgagattgcaccactgcactccagcctgggcaacagagggagtctccgtctcaaaaacaaaaacaaaaccaaaaaaaaaaacctcactgaattgtaaacttgaaatgagtacattaaacaattaaaaaaatttttaaattgaagtaaaataccataacaacaaattgaccattttaactattttaagcatacagctcagtagtgttaagtatattcacattgttgcacaaccaatctctggaattgtttcatcttataaaactgaaaaaaaaaaccaacaaaaactgaaactttaccgattaaacgacgactacccatcgccgcgtgccccagcccctggcaccccccgttcgactttttgtgtctatgagtgagttgactctggggacctcctatgagtggaataatgtggaatcataccatatttgtctttttgtgcctggctggcttatttcacttagcataactgcctgtgtcagaatttccttccttttttttttttttttttttttgagatggagtctcgctctgtcacccaggctggagtacagtggcacagtctctgctcactgcaacctccacctcccgggttcaagcaattcttctgcctcagcctcccaagtagctgggactacaggtgtgcaccaccacacccagctaatttttgtatttttagtagagacggggtttcaccatgttggccaggctggtctcaaactcctgacctcaaatgatccaccagctcagcctcccaaaatgctgggattacaggcgtgagccaccacgtctggcccacaatttccttcctttttagggctgaattatattctatcgtatggatggagcacattccacttatccattgatctgtttatggacacctaggttgcttcaatcttttttttttttaacggagtcttcctctatcacccaggctggagtgcagtgtcgtgatcttggctcactgcaacctccacctcctgggttcaggtgattctcctgcctcagcctcctgagtagctgggattacaggcacgcaccaccacgcccggctaattttgtatttttagtagagacgggatttccccatgttgtccaggccagtctcgaactcctgacctcaagtgatccgcctgcctcggcctcccaaagtgctgggattacaggcgagagccaccacatctgacctgcttcaatcttttgactattgtaaataatactgctatgaacatgagtgtacaaatatttctttgagaccctgctttcagttcttttggccacacacccagaaatggaattcctgggccatatggcaattctatttataatttatttgaggaactgccagaagctttttccacagtggctgtaccattttacattcccaccaatagtgcacaattttgtcacattctcaccagtactttcatgttctgtaatttttttgatggcagccatcctaatgattataataaatgggtgcatcttattgtatataaattacatcatggctgggcatggtggctcacacctgtaatcccaacactttggacaacaaggcaggtagatcacctgaggtcaggagttgagactagccttgctgacatggtgaaaccccatctctactaaaaatgcaaaaattagctgggcgtggcagtgagcccctgtaatcccagctagtcgggagactgaggtggaagaattgcttgaacccgggaggcagaggttgcagtgagccaaggtcgcaccactgcactccagcctaggtgacagagtgagacctcatctcaaaaaaaaaaaaaaagaaagaaaaagaaaagaaaagaatatttatacctgggtcaagtgaaaattagacaaagagagacatatggccaccctagataaggtaagttacctgtgtgtatttttaggcaaggagagagttacagttatatcttaggtggtaacatcttacgggtgttaaaggtttattgcaggtgtttccagtggtttttcttgagttgagttacttccatcaaggtgtacaggtacttacagacctattagggcatgctatgaaatagtcacaagtggttactgttgtgatatgggtgagctccagctaagcttttgtattagtcagctactgctgcagttaacaaattatctcaaatttagtgacttcagacaatgcaaacttattatctcactgttctgaagatcagaagtctgacactgatcccattggacttatattaagatgatggcagggttgcatccttctgggggagaattcatttccttgccttacataacttctagaaatggctgctatggtttgaaagtttgtgtcttttcagaattcatgtgttgaaacctaacctccaagatgacggtattagaaggtggaggctttagggggtgactaggtcatgagggtggggccctcatgcatggaattagtgccctcatcaatcatcagagacttacttgccctttctaccatgtgaagacatggcaagaacatggccatctgtgaaccaggaaaagagccctcacaagacagagtctgccaacatgttggttttggacttcccagcctccagaattgtgagccaaaaatgtgtggttgtttagaagcaactcagtttatggtgttttgttatagcagcctgaacagactgaaacagccactgatgtccttggctcttggtccttttctcctttttttttttttttttttttgagatggagttttgctcttgttgcccaggctggattgcaatggcgtgatctcggctcaccacaacctccacctcctgggttcaagcaattctcctgcctcagcctcccaagtagctgggattacaggcatgtgccagcatgcctggttaattttgtacttttagtagagacggggtttttccatgtttgtcaggctggtctcaaactcctgacctcaggtgatctacccgccttggcctcccaaagtgctgggattacaggtgtgagccaccgtgcctgtccccccctttttttttttttttttttgagacaggatctcagtgggttgcccaggctagaatgcagtggtgcaatcatagctcactgcagcctccagctcctaggctcaagtgatcctcccacctcagcctcctgagtagctgggaccacagtcatgtgccacgatgtccagctaagttttcaaattgtttttgtgaagattaggtctccctatattgcccaggctagtcttgaactcatgggtcctagagatcctcccaccttggcgtccccaagttctaggattgcagtggcataatcttggctcactgcaacttctgcctcccagattcaagccattctcctgcctcagcctcccaagtagatgggattacaagcatgcaccaccacgcccagctaactttttgtatttttagtagagacagggttttgccatgttggccagtctgatctcaaactcctgacctcaggtgatctgcccacttcagcctcccaaagtgcgaggattacaggcatgagccactgcacctggcccccttcctccatctttaaagccagcaatggtgagtggagccctcacatcacagcactctgccccttctgaaggccttctgcctctctgattttctcctgcctctctcattcacttttaaggacacctgtcattacttcaggcccacctagataacctaaaataaactctcccattttaggagtctttttttttttttaaattttttgagagggagtctggttctgttgcccaggctggagtgcagtggcgctatctcggctcactgcaaccttcacctcccgggttcaagcgattctcctgcctcagcctcccgagtagctgggattacaggcatgtgccaccatgcctggctaatttctgtatttttagtagagacggggtttcaccatgttggccaggctggtctcgaactcctgacctcaagtgatctgcctgccttggcctcccaaagtgctgggattacaggcatgagccacggcgcccagccaggactcttactttaatcacatgtgcaaaatcccttcgtgatacctacctaaggtatgacatattcacagatttggggattggcacagggacatctttggggaaggcatttttttgcctactacagaccttgcacggtgttctatgcaattggtgttgcgccccagggttgttacaggtgtatttcaggtcttacaggggcttctcagagcccctgggaactccaggaaagtggatctgtcttgagaatgctgacggggctcagcctgggtctggcgtcggtcccatcaggctctggggaaatgtcacacggtttgtcaggcacaggccacttcctgcacccccatcagccctttttttttttttttgaaatggggttgtgctctgttacccaggttggagtgcagtggcgtgacctcagctcactgcaacctccacctcccaggttcaagtgatcctcccacctcagccttctgagtagctgagaccacaggcacatgctaccacacccggctaattttttgtatttttgatagggacgggatttcaccatgttgtccaggctggttgaaaactcctgactcaggcaatcaatccacctgtctcagcctcccaaggtgctaggattacaggcgtgagccaccgcacctagcctgttttttgttttattttattttgttttgtttgtttgtttgcttgttttttgaagtagagacaggatcctgttatgtcacccagggtggactgctgcagtgacgtgatcatagctcattgtaaccttgaactcctgggctcaagcctcttgcctcagcctcctgagtagataggactacaggcatgtaccaccatgcccagctcatttaatttaaaattttctttttatagagatgggggtctcactatgttacccaggctgggcttaaactcctagtctcaaatgatcctcgcacttcagcttcccaaagtgctgggattacaggcgtgagccatcacactcagccacctgtcagcctttagaatagtctttctggcaccaccaatattccaggaaaacaaaagccaactgaaggttaaggtctgttccagaaatagggataggctccagggattcctttcttcccagagaagttgaatcttggagtggagggtgtggcctggggcctgggacctgactctctcatttggggtcattatgggccttctggaacactggtgggttacagccaggcgactgggaggtagggcttgtgagctgatcataaatgcagatggcaggtggcgaggagaggacggacatatccaggccagccacttggctctctgggctcctgacctggagctcccttgggccctgctgcccccagaatctgagcctgggggtaccaggggctccagggcatgctctggccatggataggatcccagggcagttccaatttaactctgctgtctggggtctctgccagactggtgtgcggtggtacaatcatagctcactgtagcctggaattcctgggctcaagcaatccttctgcttcagccttccaagtacaggagaatacaggtgtgcaccaccatgcccagccttttatttttattttattttattttattttatgttatgttgagacagagtccctctctgttttccaggctggagtgtagtgacacaatctcggctcactgcaacctctgcctcctgggtgtaagcgattctcctgccttagcctcccgagtagctgagattacaggcacccaccatcatgcccggctaagttttgtatttttagtagagacagggtttcaccatgttggccaggctggtcttgaactcctgacctctggtgatctgcccacttcggcctccctaagtgctgggattacaggcgtgagccactgcgcccagcctattttttaagtagagatgaggtcttggtatgttgccccaggctgatctcaaactcctggactcaagtgaccttcccacctccacctcccaaagtgctgggagtgtttacggaaataccaggggtttggtctaggtcctgctgttcaccgcacagatagccaatcaccgaggcaaggattattgccaagcaagaaggctttaggctttaattggatgctgcaaccaaggagatgggagctcagtctcaaatccatctctctggctgattaaaattaggggtttatatagcaggggagaaatagaacaatatgtggtaaaacaggaacgcgggaggggtcaggaagcaattgtgatgaatgagcagcctggtgtctcatcgtctgcatgtaatgatctgctgagtttcaactctgatgatttttgagagcctggggatcctttcctgagaaggaactcagataaaacaaatttttttggtttgtttatttgagacagagtttcactcttgttgcccaggatggagcacagtggcgcgatcttggctcactgcaacctcctcctccctggttcaagcgattctcctgcctcagcctcctgagtacctgggattacaggcgcccgccaccatgcctggctaatttttcgtatttttagtagagacagggttttgccaagttggccagagtggtctcgaactcctgagctcaagtgattcatccgcctcagcctcctaaagtgctgggattgcaggcgtgagccaccgcgcctggccagataaaactaatgctaaatttcaagctttaagaccacagggtcaggccgggcacggtggctcacacctgtaatcccagcactttgggaggtcgaggtgggtggatcactggaggtcaggagtttgagaccaccttggccaacatggtgaaaccctgtctctactaaaaatacaaaaattagctgggcgtggtggcgcatgcctatagtcccagctactcgggaggctgaggcaggagaatggcgtgaacccaggaggtggagcttgcagtgagccgagattgcgccactgcattccagcctgggcaacagagcgagactccgtctcaaaaaaaaaaaaaagaccacagggtcaatttctatgtttattgaaaagaactgtctatggcaacaatccctaacctttttggcaccagggaccggttttggagaagacaatttttctttttcttttttttttagagacagagtcttgctctgttgcccaggctggagtgcagtgtcgtgatctcggctcaatgcaactgccgcctcccagattcaagccattctcccacctgagcctcccgaatagctgggattacaggtgcacaccaccatgcccagctaattcttgtatttttagtagagacggcgtttcaccatgttggctgggctggtctcaaactcctgacctccggtgatctgcccacctcagcctcccaaagtgctgagattacaggcatgagccactgcacccagcagacaacttttccacagactggggtgggggatggtttcaggatgattcaactgcgtgacatttattgtgcactttatttctataattattacattttaatatgtaatgaaataattatgccactctgcataatgcagaatcagtgggaactctgagcttgttttcccgcaactaagacagtcccatctgggggtgatgggagacagtgagagatcatcagtcattcgattatcctatgacccagatccctcgatgtgcagttcacaataggcttcatgctcctgtgagagtctaataccactgctaatctgacaggaggcagaggtcaggtggtcatgcaagcaaaggagagtggctgtaaacacagatgagctttgcttgctcacctgctgctaacctcctgctgtgtggcctggctcctaacagggcacagatcagtaccggtctgcggcctgggggatgaggacccctgttctatgagactgttgggtgggtttcaggatgacaggtgcacaccactgcactcagcctctcttccttctgcctcagccacagctggcactttctcagctccatcctcaggggagatgctgaaacctcttgtgcctgcccgtgctgttgctgtacatttgtcacgacagcctggcaggggctccccattgaggctgtcggtcagacttgaagtccatctgttgttcttttaaaaaaaaatttttttttagatggagtttcactctgttacccagactggagtgcagtggcgtgatctcagctcactgcaacctccaccttccgggatcaagtgattctcctgcctcagcctcctgagtagctgggattacaggcacccacaaccatgcctggctaatttttttgtatttttaatagagatggggttttgccatgttagccaggctagtctcaaactcctgacctcaggtgatccacccaccacagcctcccaaagtgccgggattacaggtgtgagccaccacacccagccatgaagtccgtctgtcgttctgtctctgttgttcttcattcgatccggagtcgccacctcattgtcagtatgtttgattacaatctgtctgtatcatccagacaatcacttaatctggctcatcaagtagttagacctctaggtaagtatctcactgctgtcccacctgggagtctatctcagatggctctgccctgtgctgtgatgctatgatggttaacacctggtgtcaacttgaccggatggagggagatgcctggatggctggtgaagcattgtttctgggtgtgtctgtgaggatgttatcagaggaggttgatatttgagtccgtgggctgggagaggaagacccatcctcaatgtgagtgggcaccatcccatcggccgccagcgtggctagaacaaagcaggtggaagaaggcgggagaagctggcttgctcgctgagtcagctccctctctcttcccctgctgtgccaatcacttggtttcctctcctcctacccttggacatcaggctctaggttctttggcctttgaactctggcacttgcaccagtggcctcccaggtgttctcgggcctttggctgcagactgaaggttgcactgtctccttccatgatttttgaggcttttggacttggactgagccacactaccactttctgtctttcccgggcttgcagacagcctactatgggacttcgccttataattgtgtgagctaattctcccaaataaactccctttaatattgtgttaggctgttctttttttttttttttcctcaagatggtgtctcattctgtcacccaagctggagtgcaatggtgtgatctcagctcagtgcaacctccacctcccaggttcaagtgattctcctgcctcagcctcccaagtagctgggattacaggcacccgccaccacacctggctaatttttgtatttttagtagaaatggggtttcaacatattggccaggctggtctcgaactcctgacctcaagtgatctgcccgccacggcctcccaaagtgctgggattacaggcgtgagccaccacacccagctgtgttaggccattcttgcattgctataaagagatacctgagactgggtaatttagaagaaaagaggtttaattggctcatgattctacaggctgtccaggaagcatagcagagatatctgcttctggaggggcctcaggaagcttccaatcatggcagaagacaaaggcgaagcaggtgtctcacatggcgaaagcaggagcaagagacagcgtggcaggggaggtatcacacacttttgaacaaccagattttatgtgaactttgagtgagagctcacttatcaccatggggatggtccaagccattcacgaagaatctgcccctatgatgcaaaacacttcccaccagcccccacctccagcactggggatacatttcaacatgagatttgggtggggacaaatatcctaactatatctcacacacacacacacacacacacacacacacgcatatcctatcagttcagtcctggacaaccctggctaacacagatttgtgatgacctgcaatataccatgtcctcatccctggatcctgtgaacatcactttatatggcaaaagacactttgcagacgtgatgatggatttcaagatgggaggagctcgtgtggtaaagaatttgtccctggttcctgctaggaagtgtctaagtccttggaattttccaagtgctgtgagtctttgttattcatcagggccctggaccacacttgggtttatatgagggggtggcttaggatgggtgctggtcatgccagatacatcaaccatgagggttggaatttgcagccacttgaccaaaagggggactggagataaagttcaatcacaaggccaacgattcagtcaatctttcctgtgtaatgagaccccactaaaaactcccgaggccttgtgaggtggctcatgcctgtaatcccagcactttgggaggccaaggcaggaggatcacttgagctcaggagctcaagaccaacctgaacaatatggtgaaaccccgtctctacaaaaaatacaaacattagctggacagggtggtgacatgtgcctgtagttccagctactcgagaggctgagaggtgggaggatcacttgagcccagaaggttgaggctgcagtgagctatgattatgccactgcactccagcctgggcaacagggcaagaccgggtctcaaaaaaaaaaaacaaacaaaactgaaacactgaaggagtaattggatcaatcctgcctacatactgaaaccccaaaaaaactcaggacaccgagctctggagcttcctggctggtgaacccatcaccctgagagtggggaaggcatagagagagtgatgtgtgctgacgttatggggaaggacacaggagctccgtgtttgggaccttcccagacctcaccctatgtatcttctcatttggcaggtcctgatttgtattttgttaagaaaactgaaatcagggccaggcacagtggctcatgcctgtaatcccagcactttgggaggccaaggcgggtggatcaccagatcaaaagagtgagactatcctggctaacatggtgaaaccccatctctactaaaaatataaaaattagccaggcatggtggtggcgggcgcctgtagtcccagctacttgggaggctgaggcaggagaattgcttgaacccgggaggcagaggttgcagtgagctgaggtcgcaccgctgcactccagcctgggcgaaagagcgagacactgtctcaaaaaacaaacaaaaaaacaaaacaaaacaaagaacaaaacaaaacaaaaaacaaactgaaatcgtaagcatagcatttcctaagttctgggagtcattctagtgaattatggaacctgaaggggtcatgagaatttgtaggcagttgatcagaaatgtgggtggctggggatccccaaacttgtagctggtatctgaaatgagagcagtcttgatggggactgtgtccttaacctctgggtggagtctgcactatctgggtgaatagtggcagaactgcatttagaattacaggaggccaggagcagtggctcatgcctgtaatcccagtgctttgggaggccaaggtaggcgaatcacttgagctcaggagtttgagaccagcctgggcagcataatgagaccgcttctctacaaaaaaataaaaaaaattagccaggcatggtggcacacgcctgtagtcccagctactcaggaggttgaggcaggaggattgtttgagcctggaggattgcttgaacttgaacctgggaagtcaaggctgccgtgagccatgttcatgctaccgcactccagcccaggtgacaaagcgagatcctgcctcaaaaagaaaattaaaaaaaaaaaaaaaaaaaggaaccacaggagatcatcctgtactatcaggtcaggccctaaatgcaatcccaactgttcatataagaaggaggcaagaccagcctgggcagcatagtgacaccccatctctacaaaaaaactaacaaatagctgggtgtggtggtgcatgcctgtagtcccagctacttgggaggctgaggcaggaggatttcttgagcccaggaggttgaggctgcagtgaactatgatcgtgctattacactccagcctgggtgacagagcaagaccctgtctcaaaaaaaggtgattgtgggggcattcctagagagatttgatacagaagaagtaattgtcatggctgaagctagatgctaccctactgcctttgaagatggaagaagggtccaggagtcaagaaggatgaggacaacagctctagaaaagctaaagaagaggtaaagaaacattttccctttgatatggtttggctgtgtccgcctccccaaatctcaccttgaattgtaataatccctgtggatcaagggtggggccaggtggagataattgaatcacgggggcagttttccccatactgttcttgtggtggtgtatgagtctctcaagatctgatggttttattttttaattttttaatttttttttttgagatgaactcttgctctgtcacccaggctagagtgcaatggcatgaccttcggctcactgcaacctctgcctcctgggctcaagcagttctcctgcctcagcctcccgagtagctgggattacaggcgcctgccaccacgaccagctaatttttgtatttttagtagagatggggtttcaccatattggccaggctggtctcttggccaggctggtcccgaactcctgacctcgtgatccatccgccttggcctcccaaagtgctgggattacaagcgtgagccaccatgcccagcctcaagatctgatggttttataaatgagagttcccctgcgcaagttatcttgcctgccaccatgtaagacatgcctttgctcttcctttcctttctgccatgattgtgaggcctccccagccatgtggaactgcgagtccattaaacctcttccctttataacttacccagtatcaggtatgtctttattagcagcatgagaacggattaatacatccttagaccttggtttttgcccagcaaaatccattacagtagtggtgggaaactcaaacactcctccaagccaactgtgtctggaagtccagcagcctggccctcagtccagtaggcaagtcaataggctcctggacttgcccagtgcctgctccagactgcaagtttagaaagatcagaggataggggggttgacaggttacagcagtggaagagttccacctggccagggaatgtgatggtgttccttctatttcctgctcagctgatgctgttatacggtccagcagcctgggggctcccagcagcctgtagttctagactccgttctgcacagaactaaaagctgccaacctgtcactcccctgttgaacctgtctccatgggaaattcttggagagcccctaactctccgagatggaagcaagaaactgggagtgtagggtgaattcagatcaaaagtccctggttgagaaacccaggttctatgtaacatatactgctgtgtgaattcagcaatctgtataccttccaacctcctagtattccttttttttgagatatggtgtcactgcattgcccagaatggagaacagtgactatatcaacaggcaagatcatagctcactgccgtctcaaactcctaggcttaagcaattctcccacctcagcctcccgagtaactgggactacgagcttgcaccaccacacccactctccaagcctttttcttcctggaccttctgcttccaaagtcctaccttcccagcttcatctactcaaaattccattgtcccttggaaaatccaccttctctggaatgtatttcctgactgacccatccaatagtcacagaccctagatgcactgagcagaagggacctgctcgttccatcagggtaccctgtcccccacctgcctcaagggcctgtctcaggatgcccataatctccacgaagacgtgacagtcttctcaaggactgcagtatctcaggatggtccctctccccaaagacaaaggtgacccttccaaatgcttcaggtgtcctctccacacactcatccattacattactggtcattttgttcctgtaccccgctagaccagaatgcagcggtcccaggggaaaggactgcgtctgacccatttctgtgtccccagcaccctctgagccaagccccatgccagggactgaggaagtaatggtgtagagtgggaaactgcccctaccttcaagccctcctggcccagggcaagttacccaccaaaggccaagaggtcactgagagagtccaggggtcactcgtacggattaaactaggacatccggaataaagcacagaagatctcgccagagccaggatcctggattcatttctcaaatatttattgatgcttcctcaggctgcaaaaacagcttccagtttggtggaaaatgcgagaaaaccaaacagctccagtcctcagtcacctaaccttggttagggagagaagtggaggcatatcacggggacgcaggagcagggattttggagctagtggaggttaggttgggtctgcgtgagtggagttaggatgaggtcggcatggaggtcccagagcccaggcactgggctggacagggctatgttgggccaagtgtttctgagactcagcagcggtggatgaggaagaaaaaactctttggcaatcagctccaggagccagggaggtgagcagcccccaggatacgacatgctgcaatgggcgcggctccagggcactgggcggggtcagcagttgtgccttttctcacagatccagccgtccttctcgctgtcacacggtgcgtcgttccacagccccgtgtgcagcatcatgacacagttctcgcgcccccaagcgtcattgggctctccctggttccagtggctacaggggggttgagtgggggtgttgctgggaatctagacagaggatgaactcggggtcccgccttcctcttcaggctctagcctgtttattgcttgggtctactctagacaccccaactgtctaacctgagtatacacctggtatataactttttaacgcccagaatttaacctgaggacagttcctggggtccagcctgcccatccctaagtatggagccccagccgaggggtccctgagatctagccaaagcatgtcctctagagcctaacctgtctccctccccaggtctcaccaggagcctttccctcacctgaagctgagagagactccgtccacccactggtagccctgaaccttgcccagatggcgcacagccctcaggcccagccagtaaccacggccacgcgtgttccgagtgaggaagccctagaaaggaggggacatctgagcctgcagagtccgccccgccctgccccaccgcctgaccacgccccctccccctgcgcacctgctcatccaggcccccaacgatcaccaggtgcgcgctggcatctgcgcagtgatcctgcgccgccgcccacgtcgtctttggcacagagaaaaagtagcaggagccctcgaaggacagccacgacgtggggcacggctcgcaggagtctgcggggtggcgagggtcagagaggtcgcgtgcttccaggggcaacgcaccgagaggatgcagtgggtaggggttcggccccgcgggctcaggggtggagacacagaaccaggccaaggtccaggagtgacagggtccgcttacgccctcacagcccgcccccgaccccccgtctcgctcactgttctggagcctcacggcctccagcgcccggaacagctcagtgcggacgtcctcacggcccctgccggcttcagccaagccctgggtcactgcggggtcaagggagcggggattatggctggggtcagggccaggaccagggtcatgactagctaaaggtcaggacccctgtctgtggtcattgtaccctcggtgccagcgtccaggatggcacagggtcaagggcggttacaactgggcagggtccgggtgtggccggcgctaggagtggcagtcaaggtcagagtgcagcgtcagggtcaggacggggtgcatgatcggggtcgggggtcagcactcaggacggggtcggggtcgggggacgcggccagggctcagggccggggtcgcgtcgggccctcaccgcgctcacgcagttcccgcagggcgctctcctgctccatcagcttcgcctgcgcctccccaagctccgcgcgcgtggtctgcagctgcgcctgcgtccccgagcctgggagccgcagggtgagaggggcgagggcggcgaggatggggcgggacttcggagaccagcccccgccccgcaccacccgccgcaggcctccgccccggcccccctcccatcgcggccgcaagaccccatccctgcgcccacagcctcgaccgcgccccctcacagcagctgtggcagtctccgacctcctccttcagggcacccagcgccgccgtctgcttcgaggctggaacgacccccgccccaaaatgcatgcccctcgggtcacttgggaggactcaggggacccccttccagcctcagggaccatagggcccccacgcactcgagactccatctccggggtctcagaaactcccgcccctcacgccccgggggcccaggcgcccggctctgcacacaccgtttgtcctcagcaggtcgtggccgtcaagcagcgccgcgcgctccgtggaggctgaggagagaggctcctgcaggcgaggccgggaactcgggaatcctcccctcgcccggggggtgcagcgtcccccaactcgggagcacggagcgggcgggcaggcatacagctcacacgatgtgcacacacgccgatgggagacaaacgcgcggggactcgcgcacatacgagcacgccatgtgcacacgcgtgagtgcacacggcccaaagatgtacacacactctgctcacactcagacgcgaacaggaccccaggatgcagctggtgcgccatgcagtgggggttttctgtccccaggggggccggatgcaacacctccccattgagagtcactcacccttggacaataggatactcagaatcacagcccaaaggactgtggtgaccaggacagccagggccaagaagaggggtctcctgctccagtgcacccagcgtccccagggccctggcataacaaggacggcatgctgggtcccccagaactgagccctggaggcctgagttactcccaggaaactgagattcagagaagttaagtaacttgcctatggtcacacagcttctaagcggcagagttggaattggaccctggtccaactggctctatggcctgtggtgtctctcctgcacccacaaccctggcctgtctcgactcttccctcccctcccccatcaaaccccagacactggggcagggatggggcagtctccttgctcatacctccggggacctcctcggagctgccgccccacttgctgtacctggtggtgtccatggcgatgcaggcacccagtcctgggcagagatataaatttcacgcctgttctcactggacctacgcactcccttccttccttcccattttcttggccttaattcctggcaacgggaacccatggaccaatcacaggattgggccctttcaaggctgggctgggctgggctggagtgaggccgggcggttccagcctcctggttctggccactgcagctccatccccaggctggtgctggaggcttctctttggagcttagtcaccatctcttatgggcctggggctggaggcttctctttggagcttagtcaccatctcttatgggcctggggctgggttttatcccgcgagggacacactgaacccgaccaaattgtaacccctgctggctcctgagaaagccccctcaggcatagccccccaggccagttcaggtcccttctcaactcccctgcaggtgcctgcagaggctgggtttgaacctgaccttgatccagtccctctgtaccagaagggaacaaacagttttgttagggaggtagccggcggagctgcaggactctaccactgtatgggttctaggtagcttctagaagccttagttttccccactgtaaaggagatagcgatgggcctctctcacaaagatgctatgataaagaaacaagacagtcttgctggctcacacctgtaatcccagcactttgggaggccgacatggaaggatcactgagcccaggagttccagaccagaccagcctgggcaatataacaagaccctcatttctgaaaaaaaaaaaaaaatatatatatatatatatatatgaaaacaaaaattgaaaaaataaaaaaataaagacaatgaggttatacatgtctacctagcaccatttcaggcatatcaaaaacactcagtgttcatgcattctttcaacaaacattgagcacctgccatatgccaggcattgatcttggaactggggccacatcagagagtaaaataagcaaattcctctcttcttggagctaatattctagaagtgtggggagacagactccatactcaacgtaataaacataattgaaaacataagttgtatagcatagtagttcccagctgggggcaattacgcccaccaggggacatttggctatgtctggagacacttttggttgtcacagaatgtgtgtgtgtgtgtgtgtgtgtgtgtgtgtgtgctccaggcatctagtgggtagaggccagggatgctgcgcaaagccctacaatgcctaagacatcccccatagcaaagaatgatctgactcctaatgtccatagtgcaaaaggtgggaaccgtagtatactctattcaaaagtcataaatgctatgaaaaaacattaagggaagaaaaaatccagtaggataagtacttggcaggactgggatgggcactaggcagtgggcagtggctagggtggccagggccagcctcactgacaaggtgaaatgttgagcacttaatagaatgttccagcccctcttgtagatatgtaaacacacttcatcttcttgagcctctcaaaaacccttatccattttttcatttaaaaattttatttgagccgaggcgcggtggctcagctctgcaatttcaacaccttggggagccaaggcagggggatcgcgagaccagcctgggcaatgtagcaagaccccatctttacaaaattaaaaaaaaattttaaattacctgggcatggtgatgtgtatcggtagtcccagctactcaggaggctgaggctggaggattgcttcagcccaggagtttgaggctgcagtgagctgtaattgtgcccgctgcactccagcctgtgacagagtgagaccctgtctcaacaataaataaataaataaattgtacttattgtctatttccccctttcttcttccaggaatgagagacattcacaataaaatgaaataaaaaaaacaagaggattttgtaaaagaaagatggaagggaaaggaaggtgaagaaaaaaccacacatctaaaaagacaagccttgtacacaaaactcagaccagggtgtcaggcttcataccagcatctcctggttttgttgaggcagggaatagggtcagacacccagcaatgggcaactgactcttccggagtaatattttggggtggggtgggagagggggatgtgtagaattaagtcctcatgaaagtttccataaatgcagtagcaattggctgtcactgagcagagagtagatggcttcctggttcagggagtggaaatgaaaccccacaagaattgcacaatctctgtccaaagcaaccatcgtaatgtgttctggggaaaggatttacatggaagtgtttcatcagcccttatggaggagatagaattagttcatttgggaaatcggaggttttctggaagagatagcatgagacgtgtggctttgacgacatgtgtattgtggacagagaaaggaaggacacaccaggcacagggcacagccaagacaaaggcaagggggcaggaaagtggggctcagctggatacacctgtggctgaagctgccttggcgagccagggcggagctgtccagtttagcgaggaagccagaaggctgcccatccatgtcccgtgcccagacctcgctgtgggataactgagaggggaagagaggtcctagaaggaggcagcagacctccactctctacccctggcctaggacagggaagggaggcctgtttctcggggaggggggcagggaacatgtaaccaggcaatttgaaggcaatatgatgagtctgggaagtataggagactgtgaggaccactggagacactggctgagccgggagggcttcctggaggaggtgatgcctggggaaggagtcagaattattccagaggagatggatacattaaagaatggccccaacatggttatcagcacatgcaaagattgggagagtaagggaacaggacttgttggagaagctgagagtaattcaggggcagtcatctggggctagggtgtcagctggggtcacatcatacaaggacctgaagagcagggacaagaggtttgggcgaatgtgggaagaaggtgaaaatcacaggattcagccccaaggccatgaccactctggtttccattctctgcagagatgagagggttgctgtaaccagggaagccagcccactgcaaagggcatatggtgtactggttgtcgctctgaattttggctttgcttttattttttattataaagtatgcaaagaggtatgcaggaaaaaaaatgaaaacgcttatgccttccactcagctttatcaagttttgatatcttcacatatttcagatattcttaaaaatcatcacgtaacaaataacaaaatgtagcaaataacatcgtataacaaacatgataacataacaaataacatcacataacaaataacataacatcgtcacataacaaatcatagcaaatagagtggaggtctcttgtaccccaccctcctcttattcccctccccaaggccactgctctcccaaacttggtgtttatcctatcttaaaatgctttaattacaaatctttcaatggtgaatatattgggctgttttgcacatctgggagctttattaaaatgtcatcacatggtctatatccttccggaacttgtttttgtcctctccacattacaattatgagatatgtctattcaacattcattctgcatttaaaatgaagataagcacaaaaaataaatgcttagtaaacacagaacaggataaagcttccttaatttgagaagtggcaatttccaggatcttacagaaatgtcttccttaatagtgaaacatgagaaccatttttggtaagatccagaagaaattcaaaatgtccacggtgtaggggattgaacagtgtcccccaaaagcaatgctggggctaactgtggtggcttacacctgtaatcccagcactaggctgaagaagtgcttgaggccaggagttggagaccaacctggacaacacaagaagaccccacctctacagaaaaatttagctgtgtgtggtggcacatgtttgtagtcccagctactcaggaggctgaggcagggcaatctcatgtcactacactccagcctgggcaacagagcaagatccccttttttttttttttgagacagggtctcactcggtttgcccagtggcagaatcacagctcactgcagccttgacctccagagcacaagtgatcctcttgcctgagccttccaggtagctgcaactgcaggggagcaccaccatgcccaactctttctttccttccttccttccttccttccttccttccttcctttttctttctttctttcctccttcctttttctttctttctttctttcttttctttctttttcttccttccttcctttctttttctttatttctctctttctttctttcccttctttctctcttctttctctcttctttccttctttctttctttctctctctctcttctttctttttattcttccttccttccttcctttcttctctctctctctctttcttttttttttttgacagagttttgttcttgttgcccaggctggagtgcaatggtgcaatcttggctcactgcaacctccgcctcctgagttcaagcaattctcctgcctcggcctcccaagtagctggggttacaggcgcatgccaccactcctggctgattttttgaatttagtacagatggggtttcaccatgttggccaggctggtcttgaactcctcatctcaggtgatccccccgcctcgacctcccaaagtgctgggattacagatgtgagccacagcacccagccagtttttctatttttttttttttttttttttttttgtaaagatttgatctcactttgctgcctaggctggtctcgaactcctggcctcaaatagatcctcctacctctgcctcccaatgtgctggaattataggtgtgagctgcctcacccagcccctatctcttaaaagcaaaacaaagcaaaatgagagaagagagacacagagggaagatgacgtgaagaggtaggaagggagaaaatcatgataacagaagcagagattccagcaatgggtgtacaagccaaggaacgccaaaggttgtcggcaaccaccagaatctagagaaacgcagggaaggtttctcccctacgcaattcagagtgaacacagccctgctgacaccttgagttcagacttccggccttcaggactgtgagagaataaatttctgttgttcaaagtccccgctttgtgctactttgtcgtggcagccctagctcactgattctggctggataaggggtaatttctgtgagcctgccgaaacgccttactcaatagtgaaatgtgagaagcatatttagtaaaatcaagaacacgataaagatgcccctcttgctattttgtcgatgcaataaggaaatataaagaattaagacctgtaaatattggaaaggatgagtcaaagctgacaatatttggaagatgcgatcttgtatctaggaagctctagggacttctggactaattaaagaacttggttgggcgcagtggctcacgcctgtaatcccagcactttgggaggctgaggtgggtggatcaagaggtcaggagatcaagaccatcctgactaacatggtgaaaccctgtctctgctaaaaatacaaaaaaaaaaaaaaagtagccgggcgtggtggtgggtgcctgtagtcccagctactcgggaggctgaggcaggagaatggcgtgaacctgggaggcggagcttgcagtgagcggagatcgccccactgcactccagcctgggcgacagagtcagacttcatctcaaaaaaaaaaagggaggacattctgacacatgctacaacatgatgaaccttgaggaaaatatgctaagtgaaataagccagtcataataagacaaaggctgtatgattccattcatgcggggtccctagagtcatcagattcatagaaacagaaagtagaatggtgggtgccaggggctggggaacggggaatggggagtcagtgtttcctggggacagagtttcacttgggaagatgaaaaagtttgcgagatgaatggtggtgatggttacacaacaatgtgaatctactttgtaaaagaaaagaaaatttcataggctgggcacggtgactcacacctgtaatcctagcactttgggaggcgaaggcgggtggatcacctgaagtcaggagttcgagaccagcctagcgaatgtggtgaaaccttgtctctacgaaaaatacaaaaaaattgccgagcatggtggcgggtgcctgtgatcccagctactcaggaggctgaggcaggagaactgcttgaacccaggaggcagaggctgcagggagctgagattgcaccactgcgctccagcctgggtgacagagtgagactctgtctcaaaaaataaaaataaaaataaaaatcctttgggctccacctactccacagatagattttcaaaattctgttgaaggatttccaaacagattttaaaacaaacttgacaagctcattatttggaatataataaagaggttatactctttagttgggaataaatagcaaagctacaagtggggacagtaacctcttgagatgggaaaacggggacggaatgagctttagttttcactgtagagattgatacgttttggttctgtgtgcacacgtgacttattccacaagtaaatgaaaacctttaaagccagagtagactcaaaaatcatccaaaaattgcacaagaatacctgagaacattttgatagagaagagccatgaccaggcaggccacagcggcccaggcctgtaaactcagcactttgggaggctgaggcaggaggatgagttgagcccgggagttcaagaacagcatgggcaacacagtgagaccccatctctacaaaaaattttttaaaagtagctagatatggtgatgcacacgtgtggtcccagctactcaggaggctgaggtgggaggatcactggagcccatgaggtcaaggctgcagtgagccatgattgcaccactgcacttcagcctgggtgacagagcaagaccttgtctcccacataaaaggagccatgcctggtagttatcaaaatataagcttggcttgggtttcccctactaaagagcttgagacaaggatttggatataagtagcttatctgggaggagattccaagaagcatcagcaggggatgggaagaatgaagaggagcaggtagggaaaggaaggaacccaatacaaaggcaccaatgagctgaaaagggcaattgggtccaatccccctgggagcctctgggagacgacatagaacaagcctcacagttcctctgcctgttgaaggtcaactcttaagtaagacggaatttagcttgcaagctgtttatgaaggtgcatctttggggtcaacatcagtagaaaggaagtgatgtttgtggtgtcttatttacaccaaagaaattctctaattctaacactagcttcctggagttagcaccacattccacaaattaaagggctaggtcccaaaagactgaccctgcttcagatgccaggtgcaaagacagtctttgcactgtctacccacacttctgccaggctggcaaaaaattgtggcttcccataagtccatctcaagttcagtaatttcctagaatgatttagagaactcgggaaaacattttgcttatgttgttgccgaactaaattgggtcagttccctggctcacagtggaaaaccaaacactgaagcactggggttttgtagagagaaaaatttattgcaaggcagccaagcaaggacacaggagtctggcccaaatctgtctctccaagttggaggctggggcagattttatatacagagggtagtgaggcatgatatgattggatcttgtaatgaggggattcaggaggcttgatctgactggatcacgccagggctcaatctgattggatcaaggatcatgccacgtggtgtccacttcttaactcagtccctgttcctcggtctgagcacttaggttccacgtggatttgcacgcttcgttcatctggacatgcccagggtatgtaacttgcaacctgggggtccacgacaactgaaaaacaactcgccattttattacacaaagttgaaccagattgggctgaatctgcggttacaatgtttaccagtttattataaaggatacaactagaggggcggggcggtgccggcaagatggctgcgcccgaaaaggtgacatttccagagaaaccaagccacaaaaagtacagggccgccctgaagaaggagaaacgaaagaaacgccagcaggaacttgctccactgagggactcaggactctcacagaaagaggaggacacttttattgaaaaacaacaactagaaaagctatggggaagagagaggcaaagattacatgaggagtggttgctgagagagcagaaggcacaagaagaattcagaataaagaaggaaaaggaagaggtggctagaaaacggcaagaacaagagcgaaagttaaaggaacaatgggaagaacagcagaggaaagagagagaggaggaggaacagaaacgacagaagaaacaaaaaccggaagctgtccagaagatgctggatcaggctgaaaatgagttggaaaatggcgccacatggcaaaacccggaacccccccttggatttcagagtcatggagaaggatggagttaattgtcccttctacagtaaaacaggagcttgcagatttggagatagatgttcacatgatttcccaacatccagtcctacccttcttattaaaagcatgtttacagtgtttggaaaggagcagtgcaggagggatgactatgactccgaagcaagcctggagtacagcgaggaagaaacctaccaacagttcctagatttctgtgaggatgtgctgcccgagttcaagaacgtggggagagactgggcgcggtggctcaggcctgtaatcccagcactttgggaggacgcggcgggcgaatcacgaggtcaagagatcgagaccatcctggtcaacatgttgaaaccccgtctctaccaaaaatacaagaattagctgggcgcagtggtgcacgcccagctaatttttgtacttttagtggagtcccagctactcgggaggctgaggcaggagaatcgcttgaacccgggaggcggaagttgcagtgagcctagatcgcgccactgcactccagcctggcgacagagcaagaccccatctttaaaaaaaaatagtaattaaaaaataacgtggggagagtgattcagttcaaggtcagttgcaacttggaacctcacctgaggggcaagtatatatgttcagtaccagtcggaagaagaatgccaagcagctctttctctgtttaacggacgatggtatgtacgcaggacgacagcttcagtgtgaattctgcccagtggctcggtggaaaatgatgatttgtggtttatttgaaatacaacaatgtccaagaggaaaacactgcaactttcttcaggtgttgagaaatccaatagagacctctgcttgtctcctcctttggcaagagctccaaggggagagagagggtgggccaccacgatgaatactacaggctgcggggaaggagaaccctagtccagaccattcctacaaaagaaatggggaatccgaaaggaaaaggaagaaatctcactagcacatgtcaaagagccaggagaggcacaattcacctagcagaggaagaaatagtgaccgcagcgggggccggtgcagccgcagtgagaacggccggagccgtcacagccggagccaaagctcctctagatcccaaagtcgtggtaggaggagatcaggtagtagagacagaactgttcagagtcccaaatcccaataaacctgttttattcttacaaaaaataataggccaggcgcggtggctcacacctgtaatcccagcaattttgggaggccgaggcgggcagatcatctgaggtcgggagttcaagaccagcctgaccaacacggagaaaccccatctgtactaaaaatacaaaaaattagccgggtctggtggcgcctgcctgtaattccagctactcgtgaggctgaggcaggagaatcacttgaacccgggaggcagaggttgcagtgagccaagatcgcgccatggcactccagcctgagcgacaagagtgaaactccatctcgaaaaatagtaataataataataaaataaagaatacaacttagaaacagccaaatggaagccatgtataagacaaaggaagatgtgggggtggaaggggttgcgtggagcctccatgccctctctgggtgccattggttgactgggggaattaattccctggtgcttccagcctgcaaaatgagctcttgcaaccagtaagtccccgatcaaaggggtgcaggaggtggtaggtggaagttgaacagatggtaggtttgcatgtataagataacgccccaggggacatagcagctacacatggcaacccaaatatcctaatctccaaaaggaagagagagtggattcttggaacacaagtccacccccaaaggcatcccacaccagctcactcataaagctccaaggatgggccagaaaaacaagctctacaccaggggaaattggaggcatgacaagaaggacagaatgggacccagccttctaaaggaggaagaatctgacaaagaacagtcccagagattttgtgaaggtcgaaggatggagagaaggaactgtagcttaaaagggggtgaagttctgctacgcaggaggggggtttggggtggcaggggctggagaaagaaactgttcttcatccctggagcaggaggctgcggactttttgcagatccagaatttggcaagattacatttgtcgtcgttccagccattgccactaaattccgcgcagtcttcctccccaacgttgttgggctctcctctgttccaatactgcttgaagctgcaaagcccatgcggaatgtgagcctctgtccccgccagctacatgagctgtgtttctaccttctgtcatcttgatgccttaacatctgccctgcgtgtgtatgctggacttgaatccctctgcatacctgataatatgcctgactcacgatgccttgagttcctgcctctcttctcacaacctgtccttgggtggactccacctattgagtgtgtgattttcaaatacaagccaaccagtctggagtccacacctccagcgacctgccttactgggctcttgtactccaagccactatcctgtactaatcaccccaaggccaggtgtcagacagcgaggggcagcccctgtgccccagagcccaaaaaatgcttcacacttcccaatcctaagcctgttcacctggccttgacctttcctttccacagaaaccataataaaggctctggcccacagtcccccctccccaccactctgactcataacagaccctggtgcttccccaggtggcccccagctgtgatgtgtcctctctctagggatctgtgtatatgagaagctattcacaatggcaggtgtctcctgagctggtggccttactggacctcagacttcctattaatacattatattttaatacacctccccggtggcaggctcctcctgcagctctgctggtggaattctaggcacctgccatgctgtctggaagtgggtatgaagaccaccttcctcaactcagtaaaacctccagattcttgggtctagggtgtcagggagttggggaggatccccagggaaagttcaaatcagagtttcacaattccagccccagtggatagggtgccccttctgagatctacctgggcaacagaggtgagccgtccacccattgccacgtgccttcctgatttagatctgaaagtcccatccaggtgaagcggttacttctggaagactgcagctgtaggaagttctggagggtacaggaggagtcaggagggagctctgcttcccattttccaggctctgtctccccatctcttggtaggaagttctgcttgtaggctaacctacagccttctggtatactaggtcctgagccccctcgtgtctgagtccctctcacatgtgtatcccacggcacatgtgtcctgacatgcacacatccatgcacagctggcctctcctcacaccctcttgctaatactgcatgtttatccatttcacatgttctgtgcatgtccatgcacatttactcataactgggcttaatgtgttggagccagaggcaaccatttcctaactgctggtcatgcacatctcctttcagctctgcactgagtgacatcacaacgacagcttgaaatcagccaccatgggaatatttacaccagggaaactggcaaacacgacccatcaggacttcttcctccagagagctggttgttaacctcttgcagcatgctgcaggggtttgcttacatttgatgtttttttccggagcattcacacatgttcagatttggtttgtatctgctctaagggtacttgagactccctcattcatatccttctcctcccttctttccaagtggagcaaaacccctcttctgcaaagtcatctctgagcacctcctccccagttggccagaagccatgccctaggccaggacggggacccccaccaggtgtacctgctcctcagcacttttgattacgacgagctgggcccccacttctttgcaggcggtgatggagtcgtgccagttccgctgggagttagacatgaagtaacagtttccttggaagaatgtccattcccagggacaggggtggcacaggcgttctgttgggggaggctggtcagggctgggcttagattaggttgtccatattcctgtacctgcccagccttcaaggtcttgagagtcagagtccttccttgactgtccacgccgggtagaccattcccctccccacttcccgagaccctcccccatccccatgagaacccaggagtcctggccccatctcctccagactaggagaagttggggctttagaactcagaacagaaggcaggagactggcttaactgagtgcctgttgtgtacctggcccactgtgaacactgagggcaatgatcacagttaccctgtgttctcatttcacagatgaggaaacttgctcaggcagggtcagtgactcaagcaaactcacaccacacaacgaccatctcaggcccaagaagccctggttccagatactcacccactgcagccttcagctgggtcagctcctggtagatctcctgctgcttagatttctctggaagctcacccactgcagccttcagccgggtcagctcctggtagatctcctgctgcttagatttctctggaagctcacccactgcagccttcagccgggtcagctcctggtagatctcctgctgcttagatttctctggaagctcacccactgcagccttcagccgagtcagctcctggtagatctcctgcatcttagatttctctggaagctcacccactgcagccttcagccaggtcagctcctggtagatctcctgcagcttagatttctctggaagctcacccactgcagccttcagccgggtcagctcctggtagatctcctgcagcttagatttctctggaagctcacccactgcagccttcagctgggtcagctcctggtagatctcctgcagcttggatttctctgagagctcacccactgcagctttaagctgggtcaggttctggtagatcgcgtcttgcctggattgttcctgacttatggagctggggaccttggacactgggccaagaaaaaaaaggaactgcaattattaaacacctactgtgtgccaagccttgaactgagccccatagggacatcatttgtgagagccaaggtcttggttaatcccctttgaagatgaagaaaactgacacctggagaaggcagcacagaaggccaaggagagccagattcttcctgtcctcctcctcctccctctcctgtcctgccctagagtggggaggggctgtgggagaggcccctacagacccccagggacaacatcttggctctcagtcccacctccctcccagatctggcagccccaggctgtgtccacagccaaaagccaggcgtggggaccccagaccctcagaacctgcccctgaccttggacaaggagcccagccaagagcgtgaaggagaggagttgcagcaccaggggaccatggccaagacaccctgagagaggatacatgcgtcagcctgccagtgtccccaccggagcctggcccagggagagcctggtctaaatccctcagcaccccaggacccaggaaccccagccccagccccctccactccaacacctgggaatccaggccctagctctaacctccccaggacccagggaccccgtccccagcctccccttccccaggtcccaggaaccaggtacctgcttccacctccccaggacccaggaatccaggccccagcctctacattcccaggtccctggaacccaggcccccagctcccacctccccaggacccagggacccaggacccagcctccccttccccaggtcccagtaacccaggtacctgctcccacctccccaagacccaagaatctgggtcccagcccctacatccccaggtcccaggaacccaggcccaagtccccacctccccatgacccaggagtccaggcccaggcccccacctctccaggacccaggagtctaggcccctgaccccacctccccaggacccaggaacccaggcttcaacttctacctccccagaacccaggagtcttggccccagcctccaccttcccaggaaccaggaattcaggccccaaactcaacctcctcaggtcccaggagtccaggcccctagccccacatccccaggacccaagagtccaggccccagcgtccagctcctcaggacccaggagtccaggagtctctcgtctctcctcccaaactgctaagtcctctctacctgctaagctcttgtatcctcgagtctgtcggaatccaaggcctctcagctgttcctcctctgaatggatagacgtgaaatcagagcctgggcaggctgaggccatggctggccatcccttcccccttcccagaatcccagcgtcccaacccagcctcacccaggaggcccagctgctgcagtcttggttccttggagtcactcatgtcaccccactctcccccagtgtccagaactcctgggggccacagcttttatttcccaccctgtgatctttacttcctaaatctagtctcccacagaaagagaaacaggaagttgggtagggatctgtcatccaaaagactagtggaaagcatcagagcatgagatgggccggatctttcaagaatttcagggaggcagtgggggatggtctggggttgacagggagaaggactcatccactcatggatggctgagcagtgggatgcttttaatgaaatctgataaattgtaagagaaagctactgtgttacaccccctccactagggcaagggtaggcaggtagcacccccagttcctggaagcactgtcccctgtgacctcctggctttcctgctttgagctgctgctgtcctcatttttgggaattcctgctgactttgggagttggggcagaatcataattgcttgtttatttaatgcctagggtagtcaggtacttttccaacagctttataaactcattcatttaatgttcctacccttcagtagatcatatgacctccattatacagatgaggaaactgaggaggcactgcaagtttagctaactggcccaaggtcacacagctggtagatggtggggctgagacttgaacccagtctgcctccacagtgcatgctgttaaccaaagagtgaaatagtatcaaagaggaaagaaaagatccatagcagctttatttagaatgatctgaaattggaacaaccccgtgtccaccagcaggtgaatgataaaaaatataatggcatattcaaagattggaatactatacagcaatgaaaaagcaaagtactagtacatttaataacatagataaatctcacaaaacagtaaaaggacccagacagagtgagtacacactgtaagatttgattttgtgtgaattttgagaacaggcagaactaacctttgaaggagactcagaatgggaattatcaggaaggagcaggtggagattgacaacggggtttctgtatgctggaaatgttctatattttgatcatagagatgtgcatttaccacatgtgtgttaaatctcagtttaaagatggaaaatacatacatgtatcataatcaaatagtggttttcgacctgatctttactttgtattcttttttaaaatgttttaattttagaataattttgggtttatagcaaagttgcaaatgtaggaaagagatttcccatatgtaaatccctcacctagggatccctaatgtgaacccagtttctcctaatggtaacatttcacatggtaatgaggtaggaaactggaagaacttgttttctggccacaaccctgcagacccatacagaatctggtccagatgagatgatgtgaagaaaccagcaggaaccagcagatggcaacaaaagcaatccctggctgcctcattgctcgtgggcataagatactccctccagtgccatgactgtttaccgatgccatggcaatgacctagaagttcccacctgtttccatggaaacaacctggacatcttcgcccttttccttaaaacttctaaagaacctgctcctcaatttgcattgacccaccccttaactgacgtataactgaaagtgagttgacatgagtataactacagctgccaagagcttgtatgttgttgactctgggtgcactgcctatgagttagccctgcttcacaaggagcagtatcattacataaaaaatatctgtctaaggccaggtatggtggctcacgcctgtaatcctaacactttgggaggctgaggtgggcggatcacagggtcaggagttcgagaccctcctggctacatggtgaaaccccatctcttttaaaaatacaaaaaaaattagccaggcatggcacgtgtctgtagtcccaactactcagggggctgaggcggaagaattgcttgaacctgggaggcagaggttgcagtgagctgagactgtgacaatgcactccagcttgggcgagagagtgagactccatctcaaaaacaaacaaacaaaaccggtggctcacgcctgtaatcccagcactttgggaggctgaggcgggcagatcacctgaggtcaggagttcgagaccagcctgagcaacatggtaaaaccctgtctctactaaaaatacaaaattagccaggcatggtggctgatgcctgtaatcccagctactcgggaggctgaggcaggagaatcacttgaacctggaaggcagaggttgcagtgagccgagactgcaatactgcactccagcctgggcgacagagtgagactccatgtcaaaaacaaacaaacaaacaaacaaaaggtggctcacgcttgtaatcccagcactttgggaggccaaggcaggcagatcacctgaggttgggagttcaagaccagtctgaccaacatggagaaaccctgtctctactaaaaatacaaaattagccaggcatggtggctgatgcccataatcccagctactcaggaggctgaggcaggagaatcgcttgaacctgggaggcagaggttgcggtgagctaagatcgtgccattgccttccagcctgggcaacaagagtgaaactctgtctcaaaaaaaaaaaaaatctctgtctgacatcactggctcacccttgaattctttccagagcgaagccaagaaccctccccagctaagccccaattttggggttcacctgtcctgcaacatttggtgaccttgaaggaacaaagacagtgagcaagcggcagtgactggtgcagcactgccgatctgccgatggtgatcgccagtgagacagtgagacagtggggatcactgaagaattagtaagacagcagagacagtggcaattggtgattggcagagaggtgaaacagcaagggatggcaagacagcaagacggcaactggtaaggtggcaagaggcgcccgtcggtgataggtcagtgagacagagaggtggtgatcagagagtggtggagtggtggcaaagaaagaaagacagagaggtggtatattagtctgttttcacgctgcttgatgaagacgtacctgaaactgggcaatttgtaagaaaaagaggtgccttttggccgtaactgccatcttccagtaatttgccaaaatgatgaacgcaaaggggaagaggagaggcacccaatatatgttctctaggccttttagaaagcatggagttgttcctttggccacgtatatgcgaatttgtaagaaaggtgatattgtagacatcaagggaatgggtactgttcaaaaaggaatggaccacaagggttaccgtggcaaaactggaagagtctacaatgttacccagcatgctgttggcattgttgtaaacaaacaagggcaagattcatgccgagagaattaatgtgtgcattgagcgcattaagcatgctaagagctgagatagcttcctgaaatgtgtgaaggaaaataatcagaaacagaaagaagccaaagagaaaggtacctgggttcaactgaagcaccagcctgctccacccagagaagcatgctttgtgagaaccaatgggaaggaggctgagctgctggaaactcttccctatgaattcatggcatcagaggtgttaaaaaaataaaagacctctggattgtgaaaaaaaaaaaaaaaagaaaagaaaagaaaagaaagaaagaaagaaaaagaggtttaatgggcggttccacatggctagggaggcctcacaatcaggtggaaggcaaaaggtaagtcttacatggcagcagaccagagcgaatgagacagccaagcaaaaggggtttccccttataaaaccatcgggtctcatgagactgactcactaccacgaaaacagtgtggaggaaactgcacccatgattcaattatctcccactgggttcctcccacaacacgagggaattatgggagctacgattcaaggtgagatttgggtagggacacacccaaacgatatcagatggtgatcagcggtcagcaggatgatgattggtgagacggagaggcagcagttgacgagagacagcaagacagccatcagcactacggtaatcaaagctgcagagctgtaacactaaccaaggactctttgaagaaccatcatcttccctagcaggcaatggagctgagcagatgaacattcggctgtagtgccatgtgatgtgggaccagccactctgaccagcaggccaataggctactggtcccctgtgacagctgagctggcccaagctgggaaacctgggcacctggccttggtggagaagaccttcacccaggccctaagttggagaccagtcagtgccattttggctcctggggacaggtgagtgtcccctctgcccccgcctccacagtattgtgtgagccaggaaataagacttttggctagatagtcaattcaaagtcccctgtagcacatctgaccaactacgttcttttttttttttctttttttgaggcggagtcttgctctgtcgcccaggctggagtgcagtggcgcgatctcggctcactgcaagctccgcctcccgggttcacaccattctcctgcctcagcctccccagtaactaggactacaggcgcctgccaccacgcctggctaattttttgtattttcagtagagacggggtttcaccgtgttagccaggatggtctcgatctcctgacctggtgatccaccggcctcggcctcccaaagtgctgggattacaggcgtgagccactgcgcccagcccaactacattcttattaccccttttcttggtccttcctcctctaatgtcattttatttttccatcagccgtttattttatttcatcttgaaatgtatgttttgtttacagttttagtttttttgtttttgtttatcatatgatattacttatcatggatattacttattacttatcatcagccaagcttgataacttagctgaggtactgtttgtcatgtttctccctatacaacattatgatcaaataaagtttttttgacaaacacatggatggcatcagaaaatctattaataatagcataccatccgggcactgtggctcacatctgtaatcccagcgctttaggaggctgaggtgaatggatcacctaaggtcaggagttcaagaccagcctagctaacatggtgaaaccctatctctactaaaaacacaaaattagccaacacggtggcacatgcctataatcccagctacttgggaggctgaggcaggagaatcgcttaaacccgaaaggcagaggttgcagtgagccgagattgtgccattgcactccaatttgggctacagagtgagactccatctcaaataataataataataataaatcaaataaacaatttaaagtagaaaacctacatatcacagtagatcaaataaaagggttcaataaaactcaacagtgactcatgatttacatttttaagtcttcatcaactaagagtagaaggaaatatccttaacatggttgtggtatccatcaaacccacagcaaacaccatttctactggagaaactttagaagcattcccattgaaatcaagacaaatgaaaagaaaatccacaaacttgcaaaaatatttgcaagacatatataaagaaatcatccagcctgggcagcaccgtgagatcttgtctctacaaataatttaaaaatttagccaagcgtggtggtgcacacctgtagtcccagctacttgggcagctgaggtgggagattgcttaagctcaggaggtcaaggctgcagtgagctatgatagtgccagtgagcttcagcctgggaaacagagcaagacccaatctcaaaagaaaaaagagactcatattcaaagtaagtaaagaactcctaaaacccaacagtaagaaaacaacaaacctagtttaaagatgagcaaaagtacagatcaacaatggaaaaacaacccaattaaaaatgggcaaaggacttgactaaacatttttccaaagaagatatacaagtggccaacgagcacgtgaaaagatgctcgacatcactaatcattcaggaaatgcaaattaaaaccacaatgagataccacctaacacccactaggatgactactacaaaaaataataacgtggccgggcacagtggctcacgtctgtaatcccagcactctgggggccgaggcgggcagatcatgaggtcaggagatcgagaccatcctggctaacacggtgaaaccccgtctctactaaaaatacaaaaaaattagccgggtgtggtggcgggtgcctgtagtcccagctactcgggaggctgaggcaggagaatagtgtgaacccaggaggcagagcttgcagtgagccaagatcatgccactgcactccagcctgggcgacagagtgagattccatctcaaaaacaataataataataataatataataacataacaaataatggcaaagatgtggagaaactggaactcttgtgcattgttggtgggaatgtaaaatggtgcggtcaccacagaaaacagtatggcagttcctaaaaaatagaaataaaaatttcattacatataatccagcaatcccacttctgggtgtatactcaaaacaattgaaagcaaggactgttttctgttttatggtgtaattgtctagttttagtcttggcgtaatgtgggcctggtagaatgagttaggaagaattccttcctcttcaattttttggattagtttgagaatttatgttagttctttgtaagtttggtagaatttagcagtgaagtcatccagccctgggcatttctttgttgggaggcattttactttgattcaatctcattactcattattgttctgtttcaggttttctatttcttcctgtttcaatcttggtaggttgtccaggaatttatccatttcctctaggtcttctaatttggttagcatatagttgttcataatagtctctgatgattttttttctgtgtatttctgtggtttcaatcgtaatctctccttttcagttctgattttgtttatttgggccttatctctttttttcttggttagtctagatagtggtttatcaattttgattatcttttaaaaaaatttccttttgctgatcctctgtttttgtttttgtttttgtttttagtctttatttcatttagttctgttctggtttgtgttatttccttccatctaattttgggtttggtttggttttacattcctagttccttgaggtgtattcctaggttgtttatttgaaatctttctacttttttgatgtaggcattttgtgtgtttttttgtttttaagacggcatctcactatgttgcctaggctggtcttgaactcctgggctcaagcaagcctctcaccttggcctcccaaggtgctgggattactggcatgagccaccgcacccggccctgatgtaggcatttattgctttaaactttccttttagtgttgcttttattgtatcccacagattttggtatgctctgtgtccattttgatttgtttcaagaattttttttatttctttcttaaggtcttcattgacccagtggttgttcaggagcatatggtttaatttccatgtatttgtacagttttcagagttcctcttgttattaatttgtagttttactccattgtggtctgagaagatatttgatataattctgattttgtaaaaaatgtgttgtggcccaacatgtgatctattctggagtatgttccatgtgctgatgagaagaatgtgtgtgctgcagctgttggatgaaatattctgcaaatatctgttaggtccatttgggctaaattgtagtttaaatctgatgtttctttgttgatttttctgtctagattatctgtctcgtgctgagagtggggtgttgaagccccaaactattattgtattgaagtctatctctccctgtagatctaataagatttcctttatatatctggggctttggtgttgggtacacatatatttaaaattgttatatcctcttgctgaatcaatccctttatcattatataatgaccttctttgcctatttttactgtctttgacttaaagtctgttttatctgatatcagtgtagctactcctgctcactttttgtttccatttgttagaatttcttttatcatcctttcacttttagtctatatgtgtttttttttttaagagatggggtctcactctgttgcctaggctggagtgcagtggctattcccagacacaatcagctcattgcaccctcaaaaccctgggctcaagcaatcctcctgcctcagctccttgagtagtttggactatagacacatgctatcatacctggctagctttacaaaaatttttttagagatgcagtcttaccatgtggcccagacaggtctcaaactcctgacctcaagcaatcatccttcttcagcctcctcctgagtatatatacgtgtctttacaggtgaagtgagtttcttatagacagcatatagttgggtctttttaaaaaattcattcagccagtctatatcttttaagtgggaaatttaatccatttacattacaggttattactaatgtctgaggacttattcctttccttttgttaattgtttcctggttggtttgcatatcttttgttcctttctttctctcttattgtttgtcgttgtggtttggttgttttctgtagtggtaacatttgagtcttttctcttcttcatttgtgttttgctctaccaatgagttttatacttttgtgtgttttcatgatggtgatattgccctttcacttccaggtgcgggactttcttaattatttcttgtagggctggtctagtgatgatgaattccttctggttttgcttgtctgggaaagtctttatttctccttcatttttgaagaataactttactgggtatagtatttgatatggtttggctgtgtgcccacccgaatctcatcttgaattgtagttcccatagtccccatgtgtcgtgggagggaccaggtaaagataactgaatcatgggggcagtttccaccatgctgttctcatgatagtgaatgagttctcatgaggtctgatgcttttataaggggcttcctcctttgctcagcattcattctctttctttccaccatgtaaagaaggatgtgtttgcttccccttccaccatgattataagtttcctgaggcctccccagccatactggactgtgagtcaattaaacctcttttctttataaattattcagtcttgggtatgtccttcttagcagcatgagaacagactaatacagtaaattgttactgcagagactggagtgttgctacaaagataccccaaaatgtggaagcaactgtggaactgggtaacaggcagaagttggaactgtttggagggctcagaggaggataagaaaacgtgggaaagtttgaatcttcctagaaacttggagggctcagaagacaggaagatgtggaaaagtttggaaattcccagagacttgttgaatggctttgaccaaaatgctgatagtgatatggacaatgaagtccaggctgacatggtctcagatgaatatggggaactttttgggaactggggtaatggtgactcttgctatgcaaagagactggcagcattttgctgctgccctagagatctgtggaactttgaacttgagaaagataatttatggtatctggtggaagaaacttctaagtggcaaagcatacaagaggaagcagagcattaaagtttgaaacatttgcagcccagtgatgtgacagaaaagaaaactccattttctagggagaaattcaagctggctgaagaaatttgcataagtaatgagctgaatattaatcaccaagacaatgggcaaaatatctctagggcatgttggagaccttcacatcaaaggcctggaggcctaggaggaaaaaatggtttcgtgggctgggcccagggaccccctgttctatgcaaccttgggacgtggtgccttgcatcccagctgcttcagccccagctgtggctaaaaggggccaaggtacagcttaggccattgctttcagagggtgtaaaccccatgccttggtgacttacacatgggctgtgggcctgcgggtgcacagaagtcaagaattgaggtttgggaaacttcacctagatttcagagggtgtattgaaacacctagatgtccatgcagaagtttgctgcaggggcagagccctcatggagaacctctactagggcagtgcagaagggcaatgtggggttggagcccccacacagagtccccactggggcactgactagtggagctgtgagaagagggctactgtcttccagacctcagaatggtaaatccactgacagcttgcaccgtgtgcctggaaaagccacagacacccaatgccaacccatgaaagcagccaggagggggccacaccctgcaaagccacaggggcagagctgcccaaagccatgggagcccacctcttgcatcagcgtgccctggatgtgagagatggagtccaaggagattactctggaactttaaggtttaatgactgccctattgggtttcagacttgcatgaggcctttgttttggccaatttctcccatttggaatgtgtgtatttacccaatgcctgtactcccattgtatctaggaagtaactaacttgcttttgattttacaggctcataggcaaaagggacttgccttgtttcagatgagacttgggcttttgagttaatgctggaatgagttaagactttgggagactgttggaagagcatgattgtgttttgaattgtgaggacatgagatttgggagaggccaggggtggaatgatatggtttggctgtgtccccacccaaatctcatcttgaaatattattcccataattcccttgtgtcgtagaaggtaccagatggagacaattgaatcatgggggtggtttccgccatgctgttcttgtaatagcggatgagttctcatgagagctgatgcttttataaggggcttccccctttgcttggcactcattttcctccctgccaccgtatgaagaagaatgtatttgctttcccctccaccataattgtaagtttcctgaggtctgccaagccatgctgatctgtgagtcaattaaacctcttttctttataaattacccagactcgggtacgtctttgttagccacatgagaacaaattaatacagcattcttgcctgacagtttctttctttcagcactctgagtatatcatcccattctctcctggcctttaagttttcttctgtgaaatctattgttagtctggtaggggttttcttatatgtgactagatgtttttctctggctgtttatagaattctgtctttgtcttttattttttacagtttgactataatgtgccttagagaagtccttttggcctgtatctatttgggattctctgagcatcctatatttggatgtctaaatcttcctaggcttgggaagttttccgttattattttgttaaataggtgttctatgccttttctctctgatacacccaaaatttaaatatttggtcaccttatgatgccccatatattatataggctttattcattctttttatgctttattctctttttgtttttatctgactagattatttcaaaagacctgtcttcaagttctggaattatttcttctgcttcatctaatctttttttttttttgtagctctcaactgtattttttatttcactcattgaattcttcagttccaggatttccgcttggttcttggtaaataacttctatctctttggtgaatttctcattcatattctgaatttttttcctgatttctttgaattttttattttttgagatgggggtctcactatgttgctcaggctggcctagaactcctgggcttaagggaccctcctgcttagtgaggattataggcatgcatcaccaaaacactcaggtagtctttgtattgtttatccgtgttctcctgtatctaattgagattctttaggttcattattttgaattattcttcaggcaatttcacaaatttcgttttcattggaatctgttactggagaattattgtgttccttctgaggtgtcatatttccttgccttttcatgtttcctgtattcttacattgatatctatgtatgtggtgtagcagttgcttcttccaattttttggattggttttcataggggaagactttttgctgttgatgtatctatggtgttggttgggtaagtcactttagctttgactgggtgcatgcagcagtgtagtctctatatgatttctttaaccataaacatcatgagtggtatctgtaaattcctcagcatcttaggctgcagttgttagcagaggctacaatgaggctttgctggggataggggtgccatgtgagccagtccttgggtcccagtggtggcagcggcaggctgggtgtacctgtgcctcggcccctgggggggatacacagatgccagtagtggtgaacaaagtgaggtgaaccccagatcttcagagagcacgctttggtgctggtggcagttgttctgggcctgttttttgagatagagttttaccttttagcccaggctggagtgcaatggcacgatctcagcttactgcagcctctgactcctggattcaagggattctcctgcttcagcctcccaagtggctgggattacaagtatgcaccaccacacctggctaattttgaatttttagtagagatggggtttcaccatgttggtcaggctggtctcgaactcgtgacttcaggtgatccacccaccttggcctcccaaagtgctaggattacagccatgagccaccatgcccagcctgttctaggcctgttgttaggtctcctgatggtacatgcatgtgcctagggtgactgatagagcagagcaatccccaggacccctggtagtgtgcttggccacctggaggacagtgccaggccatgcaggcctgtcctcaggcccccccagtggcattcatgcatgcaggctgtgacgggaagggaaaggcactgtgcttgggtggtggtggctgcagtggtggtggatgggaagagcctgtcctcatggtgtctgcaggtgcaaggtggccctgctgctaggagtgggggtttgctgtcaatggcagcagccccaggaaggtgtctctcaagttcttgggactttgtctacctttgtcctggggacaggctccccactgtgctccactgcgctccactgcctgttccctggtacgtaagacattatgtgggctgcagcgctggggatcctgctacattcctgggtccaactactgtggcactgcggtagtcttctggatggatctgaagggatatcagttggactccatggacaaggagatgcaggggctgttgggtcccagggcaggatgtagtctggtggggactggcttctccaaatggcactgtgctgcaactacctgtgtgttgggggatgtgtggaacccagagtcagctccctctctggagtaatgttgtcacatgaactccaagcagcaccttatactggtctcatggcccatgagggttgaggagctctcccacagctaggatttcaggagttcatggtgggaatgtgcactgcaggggatctctcacttaccctgttcctgcactgggaaccccccaacctggtgctcccagctgatccaggctgggccagctgccttgtttccctccttccaggccacagatgtttcctatcacttctctgctgaattccagtgttttctcttagttgctgtattcaaagtgtgattatctacccactgtttaattcttctttggggaggaggtgagtgccagatgcctccaatctgccatgttgaactgcctctgtatttctcatttttaaattgatatataacacatttacaacacagtacacaagtcttaaatatatagttcaagagattttgacatatgggccaggcacagtgactcacacctgtaatcccagcactttgggaggccgaggagggcagatcacttaaggtcaggagttccagaccagcctgtccaacatgatgaaacccgtctctactaaaaatacaaaaaaattagccaggcatggtggcatgcacctgtaatcccagctgctcgggaggctgaggcaggagaatcacttgaccctgggaggtggaggtcgcagtgagccaagattgcaccactgcattccagcctgggcaacacagcgagactccgtctccaataaataaataaaaatacaaaaattagccagatgtggtggcgcacacctgtagtcacagctactcgggaggttgaggcagaagaatcacttgaacccaggaggcggaggttgcagggagcccagatcagccactgcactccagcctgggtgacagagcgagactctgtctcaaaaaaaaaaaaaaaaaaagaaagaaagaaagaaagagaagaaattttgacatatgaattcatccatgcagccacttctcagaaaaaaatatggaacattgtcagcagaaaatttccttctaccccattctggtcagtttacacccactccttccagaaagcccccaatttgagtcccatcaaaggttagttcttctgcctattcttgaaattcatgtaaactcaaaatcttacagaatgtattcattctgtttgggtttcttaactcttgtgagattcatccaaattgttgtttgtatcagtactttgctttttcattactgtatagaattccaccctctgaatatgccatgatatttgttttcattcacctgctggtggccacatgggttgttccaatttgggttgggatagtctaactaaagttactataaatctttctattttgcccttgatgttattagaccctctttggttaactgggtggagtgtggaggaaaactgcctggattcgaatctcagctccaccatttaccagctgtgtgaccttgggctagtttcttaatctcgcagtgcctctattttcccctatctgtaaactggaggtcacatgatctactgcagggtaggaaagttaaatgaaggagttttataaagctgttggaaatgtgcctatcataggtatgaaataaacaactatcgttcatctccaactcccaaaaacaaaggaaattcccatgaatgagagcatccgcagaccaaaagagcagatcctggaggtcagagggcatggtggttccaggaactaggcggtactgcctgcccacccctgccctacgtagggaggcataacaaagtcgctttccattagaatgaattgaattttattaaaagcatcccatcgctcaaccatgtcatgagtggaggagtccttctccctgtcaaccccagaccatcccccaacacctccctgaaattcctgcaaggtcaggccgatctcaggctctgactcctttcactagcctttctggtgatgtgatcttacccagcttcctgtttgtcttcctgagagacagtagatttagaaagtgaggatcagagggtggaaaataaaagctgtggtccccaggagtcctgaacatctggggacagcgggaaaacatgagtgactccaaggaaccaagggtgcagcagctgggcctcctgggtaaggctgggttggaactctgggatcctgggtaaggggaagggatggcccaggctctgagctgatgtctgtcaattcagaagaagatccaacaaccagtggcatcagactttttccaagagactttcaattccagcagatacatggccacaagagctctacaggtaggcaagagttagggagcagatagtggaagacagagcctcccagacccctgggtcctggggaggtaggtgttggggtctggaatcctgggttctggggaaggaaggtctgagacctgggttcctgggtcctgaagaggacggggtagggatctgaactcctcacacctggggaggtgggggttgaggcttgggttcctggggcctggggaggtgggagaggggttctggactcctgggacctacagaggtgggggttggaagctggacacctgggtccatgggaggtagggactggagcctggactcctggaaccagaggaggtgggagaaggggcctggattcctgggtcctggggcaggtgagaactggggactggaatcctgggtcctggggaggtgggagctgggaccagattactgggtcctggggaaggtgagaactggggcctgaattcgtgggtcctggggaggtagaagcaggtatctgggttcctaggacctggggaggtgggagcttgggcctgggttcctcctgggacctggagatgtggaggctgggacctggatgcctgagtcctggtgttgcaggataatttaggaatcacagagatcaaggggttgaggaggatttattattattattattatttaggtgcaccagcccagtcagattaacatccaaaaagactgagccccaaacaaagagtcaagttaccttttaagcatttcatggggtagggggagatctgtgcagggggaagcatattacagaagcgagaaacaaagatagttattcaattgagacatgcattacgtcatttcttatttttcaaggaaaaacatgttttacaacttgagtttatctgcctagtgaccttgcagctgcacagctagagaaacagggtcttcacaatgcctgggaaagggagagataaggctcactagccacacacagaaaaacaggcagttaattcttttttattttatttatttagtttttatttttatttatttatttattttttttgagacagagtcttgctctgtcacccaggctggaatgcagtggcgccatctcggctcactgcaagatctgcctcccaggttcatgccattctcttgcctcaccctcccgagtagctgggactacaggcgcccaccaccaccacgcccggctaattttttgtatttttagtagagatagggtttcactgtgttagccaggatggtcttgatctcctgaccttgtgatctgcctgcctcagcctcccaaagtgctgggattacaagtgtgagccaccatgcctggccaaaaaggcagttaatttttaaaggattccacctctttctcttcctcagggggaattgggttttcttacatacaactgagtttttgcttacacattctttaatttcttttcattcctgttccactggggaggtggacgcaggtacctgggttcctgggacctggggaggtgggggttgggacctaaactcctgggacttggggagggagaggctggggatggggttcctgggtcctggggaggttagagctagggcctggattcccaggtgttggagtggagggggctggggctggggttcctgggtcctggggtgctgagggattaggccaggctctccctgggccaggctcaggtgggaacactggcaggctgacgcatgtatcctctctcagggtgtcttggccatggcgccctggtgctgcaactcctctccttcatgctcttggctggggtcctggtggccatccttgtccaaggtcaggggcaggttctgagggtctggggtccccaggcctggccttttggctatgaacagagcctggagtggccaggtctgggagggaggtgggactgagagccaagatgttgtccctgggggtctgtaggggcctctcccacagcccctccccactctagagcaggacaggagagggaggaggaggaggggaagaacctggctctccttggccttctgtgctgccttctccaggtgtcagttttcctcatcttcaaaggggattaactgagaccttggctctcacaaatgatgtctctatggggctcagttcagggcttggcacacagtaggtgtttaataattgcagttccttttcttcttggcccagtgtccaaggtccccagctccctaagtcaggaacaatccgagcaagacgcaatctaccagaacctgacccagcttaaagctgcagtgggtgagctctcagagaaatccaagctgcaggagatctaccaggagctgacccagctgaaggctgcagtgggtgagttgccagagaaatccaagctgcaggagatctaccaggagctgacccggctgaaggctgcagtgggtgagttgccagagaaatccaagctgcaggagatctaccaggagctgacccggctgaaggctgcagtgggtgagttgccagagaaatccaagctgcaggagatctaccaggagctgacccggctgaaggctgcagtgggtgagttgccagagaaatccaagctgcaggagatctaccaggagctgacggagctgaaggctgcagtgggtgagttgccagagaaatccaagctgcaggagatctaccaggagctgacccagctgaaggctgcagtgggtgagttgccagaccagtccaagcagcagcaaatctatcaagaactgaccgatttgaagactgcatttggtgagttcctgcacatcaagggtccttgggcctgagatggtctctgtgtgatgtgactttacttgagttaccaaccctgcctgagcctcagtttcctcccctgtgaaatgagaacacggggtaactgcgatcattgcacttggtgttcacagtgggccaggcacacagtagacactcagttcaaccaatccgctgccttctgttctgagctctaaagctgctaattctcccagtctggaagagatggagccaggactcctgggttctcctggggatcagggagagtcttgggaagtagggagaggaatggtctctccccattccaagcggtccacccaacatggacagtcaaggaagggccctgattttcaagggcttgaaggctgggcagatatgggaatatggacaacctaatctgagcccagccctgaccagcctcccccaacagaacgcctgtgccgccactgtcccaaggactggacattcttccaaggaaactgttacttcatgtctaactcccagcggaactggcacgactccgtcaccgcctgccaggaagtgagggcccagctcgtcgtaatcaaaactgctgaggagcaggtacacgtggtgggggtcctcgtcctggcctggggcatggcttctggccaactggggaggaggtgctcagagaggattttgcagaagaggggctttgctctatttggaaagatgggaagagaaggatatgaatgaaggggtcccaggtacccttcaagcaaatacaaaccagatctgaacacatgtgaatatttgggggaaacgtcaaatgtaagcaaaccaccacagcatgctgcaggtgtttaacggccagctctccggagagaaaattcctgatgtgttgtgtttgccaatttccccagtgtaaatatttccactgcggctgatttcaagctgtgatgtgctgtcactcagtgcagagctgaaaggagatgtgctggaccagcaattagtagtgggtccaatgtggctccagtacatgaaacccagtcaggagtaaattcatgtggacatgcaaaatagataaacatgcagcattcacaggagcacatgaggagaggccagctgtgcatgcgtgcctgcatgtcaggacacacatgccatggggatacagatgtgagaggggctcagacatgaggaggctcaggacctgctatatcagaaaactgcaggttaacttgaaagcagaactttctgccaagagacggggaggtggaacctggaaaatgggaagcagagctccctcctgactcctcctctaccctccagaacttcctacagctgcagacttccaggagtaaccgcttctcctggatgggactttcagacctaaatcaggaaggcacgtggcaatgggtggacggctcacctctgtcacccaggtagattctgggagaaagggacactgtatccagtcgggctgggttcctgcaactctgacttgagctttccctgggggtcccccccaacctccctgaccccataggactaagagtctggggttttactgagttgaggaaggtggtcttcatacccacctccagacaggatgaaaggtgccaagaattccaccagcagagctgcaggaggagcttgccctgtgggtaggtgtgttaaaatacagtgtattaataggaagtctgaagtctagtaaggccaccagctcaggagacaattgccatttacacaaagtgagtagcttatcctacccacaggttcctagagggcgcacatttcacagcagggggccgctggggaagcagcagggtctgtcgtgagggaaagtcatggaggggactgtgggccagagcttttattatggtttgcatggggagaaaagggcaaggccaggcaagcaggcttcagatgggcagatatgaagcattttgtgggctctggggcatagaggctgcctagcggcctgacacctggccttggggtgattagggcagaaagatagtggcttggagtgcaagagcccaataaggcaggtggttggcagtacagaccccagactggttggtttgtattttaaaatcacactctcggccaggcgcggtggctcacgcctgtaattccggcactttgggaggtcaaggcgggtagatcacgaggtcaagagatcaaaaccatgctggccaacacggtgaaaccccgtctctactacaaatacaaaaattagctgggtgtggtggcgtgcacctgtagtcccagctactcaggaggctgaggcaggagaatcacttgagcccaggaggcggaggttgcagtgagccgccaagatcatgccactgcactccagcctggcaacagagcgagaatctgtctcaaaaaaagaaaaagagaaagaaaagaacaaaggataaaaaagaaaatcacagcctcagtaggagtcctcccaaggctgggatgcagcaagagaggcaggaactgaaggcaacatgactcgggcatattatgaggtgtggagagcaatgcatgtccagcatacacatgtagggcagatgttaaagcatcaatattacagaaggtaggagtgtggctcatctactgggcagggcagaggctcacattctgcatgggctttgcagcttccagcggtactggaacagtggagaacccaacaatagcgggaatgaagactgtgcggaatttagtggcagtggctggaacgacaatcgatgtgacgttgacaattactggatctgcaaaaagcccgcagcctgcttcagagacgaatagttgtttccctgctagcctcagcctccattgtggtatagcagaacttcacccacttgtaagccagcgcttcttctctccatccttggaccttcacaaatgccctgagacggttctctgttcgatttttcatcccctatgaacctgggtcttattctgtccttctgatgcctccaagtttccctggtgtagagcttgtgttcttggcccatccttggagctttataagtgacctgagtgggatgcatttagggggcgggcttggtatgttgtatgaatccactctctgttccttttggagattagactatttggattcatgtgtagctgccctgtcccctggggctttatctcatccatgcaaactaccatctgctcaacttccagctacaccccgtgcacccttttgactggggacttgctggttgaaggagctcatcttgcaggctggaagcaccagggaattaattcccccagtcaaccaatggcatccagagagggcatggaggctccatacaacctcttccacccccacatctttctttgtcctatacatgtcttccatttggctgtttctgagttgtagcctttataataaagtggtaaatgttgtaactgcagatccagcctcatctgattcaactttgtgtaataaaatggcgagttgcttttccgttgccataggcccccaggttgcaagttatgtgcactggtcatgcccagatgaaccaagcaggcaaccatgggcggaacctatgtgcttagactaaggaagggggactgagttaagaagtgaacaccacatggcatgatccatgatccaatcagattgagtcctggcatcactctatggcatgatccaattaggccaagcctcccacatcacctcattgcatgatccaatcaggttacacctcactaccctctgtgtataaaatcttcctcagcctccagctcagagagacagatttgaaccagattcctgtctccttgcttggctgtcttgcataaacttttctctctataaaaacccagtgttgggtcaggcatggtagctcatgcctgtaatcccagcactttgggaggtcgaggcaggtggatcacctgaggtcaggagtttgagaccagcctggccaacatggtgaaaccccatctctactaaaaatacaaaaaattagctgggcatgctgggcggtgcctgtaagcccagctactttggaggctgaggcaggagaatcatttgaacctgggaggcggaggttgcagtgagccaagatcgcaccactgcaccactccagccagggcgacagagcaaaactccgtctcaaaaacaacaacaacaatgacacacacaaaaaaaaacccacacagacttcgcctcccttctaccatgttgacctcaaggacattccttaataaacagcttgcttgctaaatcccatctcccttagagtcgacctgcaactggcatgagaactgtgaggcttgtttttgttgttgttttttgtttgtttgcttttgttttttgagacggagttttgctcttgtcacccaggctggagtgcaatggcacgatctgagctcactgcaaccttcacctcccaggttcaagcgattctgcctcagcctcccaactagctggaattacaggtacgtgccaccactcccaggtaattttttctttttttttttttttttgtatttttagttgagacagggtttcaccatgttgaccaggctggtctcgaactcctgacctcaggtgatccacctgcctcggcctcccaaagtgctgggattacaggcgtgagccaccataactggctgcggcttatttgatatcagtggtccccaccttatttggcaccggggaccagtttcatggaagacaatttttccacggaccaggggaaggggatcatttcaggatgattcaagcacattacatttattgtacactttatttctattattattgcactgtagaatataatgaaataattatacagctcaccatcatgtagaatcagtgggagccctgagcttgttttcttgcaaatagatggtcccatctgggggtgatgagagacagcgatggatcaccaggcattagattctcataaagagtgtgcaacctagatccctcgtgtgtacagtgtacaatagggttcccactcccatgagaatctaatgccaccgctaatccaacaggaggcagcgctcaggcagtaatgcaagcaatggggagtggctgtaaatacagatgaagcttcactcgctcgccctctgttcacctcctgctgtgcagcctggttcctaagatgccacggactagtactggtggcccaggggacagggacccccattctacatcatctaccagaggctcctggagaaactgagccccagttgcccacatgggtcataagctcgtccatgcctgtaaattggcttccttccttttcctacctgcccctcttcactttcccccttgtcttctggtacttcttggaacctcctcccagataaaccacttgtatcaaaatccttgtcacaggctttgtccctggtgaaactcaagccaaacttatagtatgttttgacacctgtcagtcatggttcttctccatcaaaatgttctcagagattcttgtgcaatttctttttttagatgatttttacatgactctagctttgaaggtcttactttactttttgaataagtcatgtgtgtgcctggaaccaaaacccatcaatctctacagtgataatgaaagctggctcccggctgggcgtggtggctcacgcctgtaatcccagcaccttgggtggccaaggtgggtaaatcacctgaggtcaggagttcgagaccagcctgggcaacatggtgaaaccccgtctctactaaaaatacaaaaatttgctgggcgtggtggcgcgtgcctgtaatcccagctactcaggtggctgaggcaggagaatcgcttgagcctgggaggtggaggttgcagtgagctgagatcacaccattgcactccagcctgggcgacaagagggaaacttggtctcaaaaaaaaaaaaaaaaagaaaaaaaagaaagctggctccctccccattctctgatctgaagaagttactcttcctagctgcaacctctttatcatattccagataatccacttgtcaaatttgtttaaaatctgtttggcaatccttcaaaagactgttgaaaatctatttgtgaataggtggagcacagaggattcttagggcagggaaactaccgtatgatactgcaacatcactacacattttttcaaatcacagaatgtacaacaccaagagtaagccctgatgtaaattgtggactctgggtgacaatgatttgtcagtgcaggctcatccattgtaacaaatgcaccactcactctgtcgaaggatgttgcataaaggttgttaatagtggtacaagcaagttgctcagatattaccttgtgttggtgctctccaaggctcagccctacccaacaaaatcttatgcgttgatatttaattttagggggcaattggcagaaatgtctatcaaggcgaatgtgaatgttttggggaaaacgtcaaaggtaagcaaatcaccgtggcctgctgcaaatgtttaacaaccagctctcaggagggaaagtatcagtgctttcagaaaacttaaagtacttttcagaaaacttaaaggccaggagagaatgggatgatatattcagagtgctgaaagaaagaaactgtcaggcgaatgatactgctgtaatcctttgcagtgagtcactaagtccagccccactcaaaggggtataagaatgtgtgaacatacgttaaaacctccatgctaattagtaagtatttgagggggaggtgatactttgaggttacggatctgctgcaactcggctcttgcctcatcagaggaaagaattcatccaagaagagtaagacagaaagtgagactgaggcaagttttagcgaaggagtgaaaatttattaaaaggttttacagcaggaaaaacaggaagtaaagtacactcttggaagagggccaaccaggcaatttgagagattgaggtgctcagtgcgacctttgacttggggtttaatgtgctgggatgctctggagtttcacatctcttctcccctgattctttcttgttgagatggagtttcattcttgtcacccaggctggagagcaatggcagtcttggctcactgcagcctctgcctcccgggttcaagcaattctcctgcctcaacctcccgagtagctggtattacaggcacctgccaccacgcccagctagtttttttgtatatttagtagagacggggtttcgccatgttggccaggctggtctcaaactcctgacctcaggtgatccacctgcctcggcctcccaaagtgctgggattacaggcgtgagccaccacgcctggccttccctgattctttcactggggtgcgctgtctgcatgcgcagtagcctgccagcacttgcggggggccacgtgaacagtgtatttactgaagttgtgcacatgcttatttcaggtgtttttccgttaccaatctagtggtcctagaggaaggtcatataccaggtaaactccacccaccaggtgcggtggctcacacctgtaatcccagcactttgggaggccaaggtgggtggatcactgaggtcaggagttcaagaccagcctggccagcatggcaaaaccccatctctaccaaaaatacaaaattagtggggcatggtgacatgcgcctgtagtcctggctatttgggaggctgaggctcgagaatcacttgaacccaggacacagaggttgcagtgagctgagattgcgtcactgcactccagcctgggaaacagagcaagactctgtctaaaaacaagcaaacaaacaaaacctctaccgattgcctcttggtgcacatgcttgagctgacttgcccggctcctgagatcttatcaggaagctgccaatcaccagctccaggtgttttctgtctattgggagcctgcctttccctaggaccagcggcccaattattattttagagaaacagtttaacaaccacctgatcatcaccttgtagcaggggggcgtctcccaccgggctcatgtctgcctacctacctactccctactctaaatggggagactgggccgggcgtggtggctcacgcctgtaatcccaacactttgggaggccgagatgggtggatcacgaggtcagaagatcgagaccatcctggctaacacgtgaaaccccatctctactaaaaatacaaaaaattagccaggcgtggtggtgggtgcctgtaattgtagctactcaggaggctgaggcaggagaattacttgaacccgggaggcagaggctgcagcaagaagagatcacgcaactgtactccagcctgggcgacagtgtgagactccatctcaaaaaaaaaaaaaaaaggccaggcgtggtggctcacacctgtaatcccagcactttaggaggccgaggcagacggatcacgaggtcagaagagattgagaccatcctggctaacagggtgaaaccccgtctctactaaaaatacaaaaaattagctgggcttggtagcgggcgcctgtagtcccagatactcgggaggccgaggcaggagaatggtgtgaacccgggaggcggagcttgcagtgagccgagattgcgccactgcactccagcctgggttacagagcgagactccgtctccaaaaaaaaaaaaaaaaagcaatttgggaagggctgagctttggagagtgccaagacatggtgatagctgagattctttgtggccctcaaagaaatagttttcttccccttgggagcaatgttaaccctgttgaggcacggaagagagtatgaaaagacaaaaagagagattctatagtagagaaacctggcagataccaccttaaccgaggctagcattgtcaataaaaggcatgttcacgtggatatcatacacacacccccataggatgtgactagaaaggcacctagcctttgtgatattctttttttttttttagatggagtcttgctctgtcacccaggctggagtgcagtggctcgatctcagctcaccgcaacctccaccacccaggttcaagcgattctctggcctcagcctcccaagcagctgggattacaggcgtgtaattacaggtccggcaccaccatgcccgggtaatttttgtatctttagtagagacagggtttcaccatgttggccaggctggtctcaaactcctgacctcaggagatccgcccacctcggcctcccaaagtgctgggattacaggcatgagccactgcacttggcctgtgatattcttaactccaaactaacaacctcgctctaaccattggagaacactagaaaaatccgaatcaaggaccattcaatacatgcctgatgaatactcttcaaatctgtcaatatcgtgaaagacaagaaacctgtcagcatttgcaggagatgcaggagaagtgatgactgatacgagctgaattttgtctcccaacaacttcatacattgaagtcctaacccccagtacctcaaaatgtacttgtatttggaaatagggtctttgtagagatgactaagttaaaatgaggtcatgagagtggattctaacccaatatgactggtgtcctttttttttttttttttttttgagacagggtcttgctctggcgaccagactagagtacggtggcacaatctcagctcgctgcaacctccacctccagagttcaagcgattttcctacctcagcctcccgagtagctgggattgcaggcatgcaccaccatgcccagctaatttttgcattttttagtacatgttgatctcaatctcctgacctcaagtgatcctgccgcctcggcctcccaaagtactgggattacaggcatgaggcactgcgcctggcctatgatgaactgtccttctaaaacggggaaatatggacacaggcacatacagaggaagacagctgaagacacagggaagaggggaccagatataaactaagaagagacacctgcagtggatccttcccccacagcccagaaggaagtaactctgccgacacgttgatcctggacttccagcctccagaactgggacagaatggatttctgttatttaagctcccctctccccagccagtggtgctcagttactgccgccaggcaaattccatcactacctgaatgcagtgtgggatcctggatgggatcttgccacagaaaaaggacacccatggaaaaactaatgaaatccgaacgagatctatagtttctagttcagagtattgcaccaatattaatttcttcactttgacatatgtacaatggtaatgcaagatgttaacatcggctggttgtggtggctcacacccataatcccagcactttgggaggccaaggtaggtggatcacctgaggtcaggagtttgagaccagcctggtcaatatggtgaaaccccgtctctactaaaaatacaaacattagccaggcatggtggcacccgcctgtaatcccagctactcaggaggctgaggcgggagaattgcttgaacccgggaggcagatgttgcagtgagccgagatcacgccattgcactccagcctgggcgacagagcaagactctgcttcaaaaaaaaaaaacaaaaacaaaaacaaaaagatgttcacattaaaggaagctgggcaaaagatatagagaaggctctgtactatctttgcaacttatctgtaatctaaaacgattgcaaagtaaaaagtttgaaaaaagactcaataaacctatttaggattccactctttaggattccacttatatgagctacccagagaaatttataatgaaagaaagtagaggccaggcgcggtggctcatgcctataatcccagcactttgggaagccgaagtgggtggatcatgagatcaggagttcgagaccatcctggccaacatgatgaaatcccgtctctactgaaaatacaaaacttagctgggtgtggtggcaggcacctgtaatcccagcaactcgggaggctgaggcaggagaatggtttgaacccaggaggtggaggttgcggtgagccgagatcatgccattgcactccagcctgggtgacaggaggagactccatctcaaaaaaaaaaaaaggaagaaagaaaagaaaaagaaaaagaaagcagaatggtgattaccagggactggggagaaaaaggaataggacttagcgtttcacagggacagtgttttagtttggaaagttgaaaaatcctggagatggatggtggtgatggttgtacgacaatgtgaatgagcttaatcccactgaactgtacacttacaaatggtcaatgttatgttatatatcgtttaccacaatttttaaaaaaagctctatcaaaaaatctatttaggatttttattgggatgagcatttgttttactctaggattttttttttttttttttttgagacggaatttcactcttgttgcccaggctggagtgctatggcacgatcttggctcaccacaacctctgcctcctttgtacttttagtagagatggggtttctccatgttggtcaggctggtctcaaactcccgaccttaggtgatccctgcctgccttggcctcccaaagtgctggaattacaggcgagagccactgtgcctggcctactctaggatttttaggatggaggaaacccattcaatgattaggagagacaagaggtggaaataaaggttgtattacttaggggtcctgggtagggagggcatggcacttccagaggccacaaacacacatatacacacacacacacacacacacacacacacacacacacacacacacacaggtcagggagagcttttgcagggagacagaggggaagcaaccagtgtgacaatgccgtgattaggtccagggtgttatccacacaggtttccctcagggagttttaattggtgggtttcatggaagcaggcgtgagtctcaggaggtcaggctgtgactgagaggtggtcactgcaccatatctgcagtccgtgtaagatgtggatgggtggtgtgggggcctgcagagccaatcaataggctgtgtccagctgccccataggcaggtggtcatcggggggaagttggataaagcagatctggatcaaccacattgaggaactaggagcaggtggggaactggaaactgtgtcaaggctgactgagccctgtttttggaaggagagtcaaacatattcagaaaggggctgacgcaacacaaattagaggaattcactacagcattcgatttataaattcattttggaagaaatagcctttctgaaatactgagtgttttggggggaaactcatcctgtgtctttctttattcagatcttagttaagcatgggagatttacccatattcttcttacgactattctttaatgtttaaaagcttttcttgccctgtgaacagggtttgttttctcctgcgtttgcaaatactcgttacttcaaccaaacaaagctgctccttttatagagaaatcttgctgtgagctctaattactcctgaagttaagcctctagaacttcctagatacgtgattatggcttcaaactacagtcagctttgactcttgctttcaatatatttataggtcttatttatttatttatttatttctgtctctctttttttttttttttttttttttttgagacggagtctcgctctgtctcccaggctggagtacagtggcgcgatcaaagctcactgcaacctccgcctcccaggttcacaccattctcctgcctcagcctcacaagtagctgggactacaggtgcccgccaccaagcctggctaattatttttgtatttgtagtagagacggggtttcaccgtgttagccaggatggtctcgatctcctgacctcgtgatccgcccgcctcagcctcccaaagtgctgggattacaggtgtgagccaccgcgcccggtctttttttttttttttttttttgagacaaggtctcgctctgttgcccagactggagtgcagtggcacagtcatggctcactgcagccccaaacccccaggctcaaatcctcccacttcagcctcccaagtagctggaactacagatgtgcaccaccacacccggctaatttttgtattttttgtagaaacggggtctccctatgttgtggaggcttgtcttgaactcctgggctcaagcagtcctcccaccttgaccttccaaagtgctgggattcacagacgtgagccactgtgcctgggcttctttttattttcttactgcattgggaaaacagcaagagggccatctttattttgttcttgactttaccaaatgcagttctcatatttaattattaaggagtttctgtaggattgtggaaattgccccttatcccaccagtatcaggcagctaggggctgttgtaagcaactaccatgaactgggaggctccaaacaatgctaatttattatctcacagtcccggaggccagaagtctggaatcaaggtgtcagcagggccatgttccatctgaatcatgtaggggagaatccttccctgcctctccctagattctggtgattgcctgttgggagccgaaaaggccaaagggatcgtgaccaactcagcattccactggaagctgtatgatcaaacagcaaagtgtttatcatgaacgcaggatgtgggcaaactcacgactgcgcctaccgccagaaggtttgctgagggcaatcactccctggcaccacgctcactggggttatctactgggacatctagagcctattgctcgaagaatgcagccttgcaagcctgctgtaaatcaagccgctgactgacaaccaccccccgcccccatctcctttacccaataaaatgcaaaggggtctaaagctcaaggtacttgttcactagaaagaagcaaggagccccccgaccccttcttccaaatatactcttttgtctttatctttattcccacattcatcatcctttgttcagtccaacagggatggaatccgtggcaaagtggcgacccagaacagggacttgaggacgttgcaaagtggcttctgaacacagagaccggaggacgtgaacgaagaaggtcggctggagcagaggaaccgaaaacgacaagatgaatggggaccccgagacaagcctgccagcagcggatataaggtcagtgccctaaagaagtactgggaacgggaagttttctgaatcagggtaacatgcggcagaatttgtctgttgaagaaaaacatgtgcacttgcttcaagttctgttgagacagtctggagctcaggttaattcgcagatactaaccaacctcctgcagaagccacaaatggttattaacgcataacccatggtctccacaggcaggcactcttgatgtggaaaactggaacagagcgggagaaggattgaaacatgctcatcaaaaaggtcttaaagttgattcttctgctttctgtacttgcagtctaattcgtactgtacttatgccgttatctccttattattctgcgggacagcaggctgagtctaaaaatctgaaagaatctgttgtcccacccacagcttcaattgaaaataaaaaacaggagagggaggataaaaattggcctatactgcctcctccagttgcagaaacatctgtgccgcctccttcggtagcaggaatagagaccccaatacaaagaattttacgctctgctgccatagctggagagccctcaggaccttgtgcttttcctatttccgtaaggcccgattcaaataatccacagcagtttattcatgaacacaccccactagagtttaagttgttgaatgaattaaaaaccagtgtagttaatatcggggtacagagcccattcactttaggattgccagaatctgcatttggtgctatgcgtcttctaccctttgatgtaaaacactgggctcgaacttgcttgtctgctagtgcatatctgacatggaatttaaatgggcaagaaatgtgtacagaccaggttagacagaatcgtgctgctggacacggagacatcgcagaggatatgctattgggtaatggcccttattcagacctggaacatcaaatggaactaaacgcgcctgggccacaattcctgaagagggagtcccagtacaatcctttttacctttcatggaagggtcacaggagccctctgcacaatttcttgcaagattacgagaggcagtgaagtgtcagattcctcatgccactgccgcagaggcgctaaccttaactttagcttctgagaatgcagacgcagattgtaaacgtgcactggcacccgtgaggtgtactaaaaacttgggaaattttctcagagcttgtcaggatgtaggaattgagcttcatcgctctgcaatgttagcggaagcaatggctgatttagtagttgacaaatctaaaaggagccaaggattaagccctcaagtgggaaaatgttataattgtggaaaaactggacattttgaaaaagaatgccgccagatctcaggacagagaggaccttataatgcagtaccccccccctcagtggaaaaaacgccaggacttttatttacttttatttacccaataaaatgtgaagggctttaaagctcagggcccttgttcagtagaagcaagaagcccccgacccctttttccaaatatacttttttgtctttatctttattcctgcatttatcatcctctgttcactacaacagggatcaaggtcagtgacagttgccgacaacctttggcattccttggcttgcagaccctttgctcgactctctgcctcttttgtcacgtggctttcttccctcttgccgttttacataatcttctctctgtacctttctcctcctcatataaggacatagtgatactggattagggaccactctcatgacctcaccataatgtagttacatcagcaaagaccctatttctcggctgggcacagtggctcacgtctgtaatcccagcactttgggaggccgaggcaggtggatcacctaaggtcaggagttcgagaccagcctgaccaacatggagaaaccttgtctctactaaaaatacaaaattagccgggcgtggtgacacacacctgtaatcccagctactcaagaggctgaggcagcagaatcacttgaacccgggaggcagaggttgcaacgagccgaggtcttaccactgcactccagcctgggcaacagagtgaaactccatctcaaaaaaaaaaaaaaaaaaaagaccgtgtttcccaattttaaaagtcacattcacagataccagaggttaggcattcagcatgtctttttgggagctataaatcaacccactaaaccacggacatctttatttgttcttcattttacctaaaatgtttctcatattttagtgttatgtaagatatttctgtaggatcccagaaattaccacttctcaaattaagaaagctttattctgttctctctttattaagcatttagtttttgtgcctgtcttcatttttaaatgaataatgggtattgaatagatatatctcataaatgtaatgtagagaggacaaaaacaagttacggaaggatatagaccatgtggtaacactcctgtaaagttttcagatgtgcaaaacaaaccagcataggtcaggcatggcagctcatgcctgtaatcccaacactttgggaggctgaggtgggtggatcacctgaggtcaggagttcaagatcagcctgaccaatatggtgaaaccccgtctctactaaaaatacaaaaattagccaggtgtgggggagtgtgcctgtggtcccagctattcaggaggctgagacagaagaattgcttgaacctgggaggcagacgttgcaatgagccgagatcgtaccactgcactccagcctgggtaacagagtgagacttcttctcaaaaaaaaaaaaatccaaaatattgtccttgggtacatgcataattattttaaataggataaacaccaagtttgggagggcagttaccttggggaggggaataggagcagggtggggtacaagggacctccactctatttgttatgatttgttacgtaatgatgctttacttttaaggtgatctgaaatacatgaagatgtcaaaacttgaaaaagccgagtgaaaggcatagcgtttatatttgtttctacaaacctctttgcatgcttcgtaataaaaaagcaaagccaaaattcagagcgacaaccaatgtgccacatgccctttgcagtgggctggcttccctggttacagcaaccctctcatctctgcagagaatggaaaccagagtggtcatggccttggagctgaatcttgtgactttcaccttcttcccacatttgtccaaacctcttgtccctgctcttcaggtccttgtgtgatgtgacccagctgacaccctagccccagatgactgcccctgaattagtctcagcttctccaacctgttcccttatcctctattcttgcatgtgctgataccgtattgagaacgttctttaatgttatttatctcctctggaataattctgactccctcctcaagcatcacctcctccaggaagccctctcggatcctccaggctcagccagtgtctccagtggtcctcacagtctcctgtacttcccaagctcatcatattgtcttcaaattccgtggttacatgttccccactcgcctgagaaacaggcctcccttccttgtcctgggccagggatagatgtggaggtctgctgcctccttctaggacctctcttccgctctcagttaccccgcagcgaggtctgggcacaggacattgatgggcagccttctggcttcctcactaagctggacagctccgccctggctcgccaaggcagcttcagccacaggtgtatccagcagagcctctatctcctccataaggtctgatgaaacactgccatctaaatcctttccccagaacacattcctatggttgccctggacagagattgtgcaatccttgcagtttttctgatttcctccctttgagcacctgtccctaaaagcctcagaatgaagagggcgtgccctccaaaaagttcctgccctacggttaagcctgctgctaagtcagctttcagcgctccgtttctgatgatgaaagcaagatgagtcagatggtttgggaacaagggaacttctagaaagaagagtctaggaagctaagttttgttaacccttcagcgtctcctaagcactgctaacttttaatgtttaacccttcctcctccctctgtaccatagacatccattctgatgtgtttgatacatgcccttacattagttttttaaggaaaatatgcttacatttgcctttcttattgctataaatttatggggtacaggtgtaattttgttgcatgcatagatttcatagtagtgaagtcatatccttaatatttatacatacttggagtgtgtgtgtatgtgtgtgtgtgtgtgtgtgtgtgtgtgttattgaatcaaatcatttctgcttctcccagctctaggctactaagaatctggactgctgctgcctgtacaactagttgattacgatttgtttcatgtgtgtactcactacactttacttactctttgcctgctcagggtcttgtaggttacccccaactctgctactgtaaacaacactgtgttgaacatccttgtaaatgcccttggagaaaccttctctaaaaagtatctctttttaaaatatcagagggtatatgccacctgtatttcactacatacttccagactgttttccaaattactgaactaatttatacttccaccagcagtgagcaacagttcccacttcctcacatcttcaccaacacttaatactatgcatctttttaatggttgcattttaattggtataaggttgtacctcattattttttctacaattaagtagacattaaactttcctgaaatatgtgctcaatctttggcttcttctatgaattgccttttcattcccctggcccatttttcaattgatttttgtgtgtgggtgtttctttgtttgttttgttttgttttttgttttgtttcttgggacagagtcttgctctgtcacccaggctggagtgcagtggcacaatctcagctcactgcaaccaacctctgcctcccggttcaagcaattctcctgcctcagcctccagggtagctgagattacaggcgcccaccacgcctggctaatttgtatttttagtagagacgaggtttcaccatgttggccaggctggtctcgaactcctgacctcaggtgatccacctgcctcagcctcccaaagtgctgggattacacatgtgggccactgcgcctggctggcccttttatgttaattcttctgacctctggaaacattagctatctttatccaaatcctttttacagtattctctaattgaatttaaatttttttctctgcagatatgtcctgtgcattttttttatttttattttacagtcttcctctattacccagctagagtgcagtggcactatcatagctcactacagcctggagcctcgaactcctgggctcaagtgatcctcccacctcagtcttcagagtagctgggactacaggcgcatgccactacatttgactaatttttgtattttttgtagagaggagggcctcaccatgttgcccaggctggtcttgaactcttgggcccaagcgatctacccgcctcagcctcccaaaaggccgggattacaggcatgagccaccgcacctggcctctggtgcattctttattgattcttagatacacgataatttgagttgctattttagaggctttatttttcattaactttctagtttgttgtttctattaattttagtaatgtaatcactctgtgcaaatgctcttcgtagttgcaatctttacatttattcctctatgtaggtgataatatttttttttttttgaggtggagtctcgctgtgtccccgaggctggagtgcagtggcgcgatcttggctcactgcaagctccgcctcccgggttcacgccattctcctgcctcagcttcccgtgtagctgggactacagtcgcccgccaccatgcccggctaatattttgtatttttagtagagacggggtttcaccttgttagccaggatggtctcgatctcctgacctcgtgatccgcccacctcagcctcccaaagtgctgggattacaggcgtcagccaccgcgcccggctggttataatattttaaaatacctggcacatggcaggtattcaatgtttgttgaaagaatgcatgaacattgagagtttttgatgaacctgagatggttctgggtagacatgcgtaacttcattgtttctcggtgtttctttgagagaagccccgtcactgtactcttttcagggttggtaaaagaaaactggggcttctaggctggccgccgtggctcacacctgtaatcccagcactttgggaggtcaaggaaggcggatcatctgaggtcacgaattcgagaccagcctgtccaacacggtgaaaccccatctctactaaaaatacaaaaattagccaagcgtggtggcacgcacctgtaatcccagctacttgggaggctgaggcaggagaatcgcttgaacttgggaggcggaggttgcagtgagccgagattgcatcactgcactccagcctggacaacaaagggagactctgtctcaaaagaaaaaaagaaaaagaaagttgaggcttcctgaagctacacactgcacagccccatccgccacccaccaagtggtagagtcctgcagctcagcagaccacctcctcaacaaaacctctgtttgctctcttctggcacagagggagtgaatcaaggtcaggttcagacccagcctctgaggagggacctgaactggcctggggagctacgccttgggggctttctcaggagccagcaggggttacaatttggtcgggtccagtgtgtccctctcaggcggaaacccagccccaggcccataagagaggggtccaagctccaaagagaagcctccagcaccagcctggggatggagctgcagcgacgaggaccgggaagctggaactacctcaccccgagcccagctcagcccagcccagcccagaaagggcccaaccctgtgattggtccaaccctgtgatttgtccttgggtccctgttgccaggaatccaggccaagaaaatgagaaggaaggaagggagtgcgtaggtccagtgaggacgagggtgaaatttatatctctgcccaggtctcggtgcctgcaccgccatagacaccaccaggtacagcaactggggcgggagctacgaggaggtccccggaggtatgagcaaggagactgccccatccctgccccggtgtctggggtttgatgggggaggggagggaagagccaagacgggccagagtcgtgggtgcaaaaaaaacaacacagagccagttggaccaggggccaattccaactctgccacttagaagctgtgtgaccataggcaagttacttaacctctctgaaactcagtttcctgagaggaacccaggcctctagggctcagtcctgggggacccagcatgccgtccttgttctgccagggcactggggacgctgggtgcactggagcccgagacccctcttcctggccatggctgtcctggtcgccagtactgtgggctgtgattctgagtatcctattgtccaagggtgagtgaccctcaatggggaggggttgcgtctggcccccctggggacacaaaacccccactgcatggcgcaccaactgcgccctggcgtcttgctcgcgtctgagcgtgagcagagtgtgtgtacatctttgggccgtttgcagtcacgcgtgtgcacatggcgtgcacgtatgtgtgcgagtccccacgcgtttgtctcccatcggcgtgtgtgcacatagtgtgcgctatatgcctgcctgcccgcccgctctgtggtcccgagtcgggggaccccgcaccccccgggcaagggaaggatttccgagtccctggccttgcctgcaggagcctctctccgcagcctccacggagcgcgcggcgctgctcggctgccaggacctgctgaggacaaacggtgtgtgcagagccgggcgcctgggcgcccggggcgtgtgcggcgggagcgtctgagaccccagagatggagtcctgggtgcgtgggggccctgtggtccctgagtctggccacggggtgtggaagggagtcccctgagtcctcccaagtgacccggcgggcatgcgttttgggatgggggtcgttccagcctcgaagcagacggcggcgctgggtgccctggaggaggaggtgggagcctgccacagctgctgtgagggggcgcggcccagactatgggcgcaagggtggggtcttgtggccgggatgggaggggggccggaggcgaggcctgcggcgagtggggcggcggggggctggtctccgaagtcccgccccatcctcgcctccctcgcccctctcaccccgcggctcccaggctcggggacgcaggcgctgctgcagaccacgagcgcggagcttggggaggcgcaggcgaagctgatggagcaggagagagccctgcgggaactgcgtgagcgcggtgagggcccgacgcgaccccagccctgagccctggccgcgtcccccgaccccgaccccgaccccgtcctgagtgctgacccctgacactgatcatgcaccccgtcctgaccctgacgctgcactctgaccttgactgccactcctagcgccggccacacccggaccctgcccaggtgtaaccgtccttgaccctgtgccatcctggtggctggcaccgagggtacaatgaccacggacaggggtcctgacctttagctagtcctgaccttgagcccaaccaaaatccccattcccttgaccccgcagtgacccatggcttggctgaagccggcagggaccgcgaggacgtcagcaccgagctgtaccgggcgctggaggccgtgaggctgcagaacagtgagggtgagggggggtaggagggggtgcggtgtaagtggaccctgcccgtgtgcgtcgccggaccccctctttgaccttggcctggtcctgtggctccacccctgagcccgtggggccaaacccctaccccctgcatcctcttggtgcgctctccctggaagcactcgacctctctgacccttgccaccctacaggttcctgtgagccgtgccctacgtcgtggctgcccttcgggggctcctgctactatttctctgtgccgaagaccacgtgggcagaggcgcagggccactgcgccgatgccagcgcacatctggcgatgtagggggcctgggggagcaggtgcgcaggaggaggcggcgttcacccgagggggcgtggccgggcggtggggcggcgccgggggagggggcaggacgggtctgactctgcaggctcaggtgtctcctcctttctaggacttcctgagtcgtgacactagtgcccgtgaatactggatcggccgcagggccgtgcaacacctgcgcaaggttcagggctactcgtgggtggactgagtcccactcagcttcaggtaggggaagggctcctggtgaaacctgggggccacaggttagactctagaggacatgttttgaggccgaggtgggcggatcacctgaggtcaggagttcaagaccagcatgggaaacgtggcgaaaccccatctctactaaaaatacaaaaaattagccgggcgtggtggcacacgcctgtaatcccagctaaccctggatgctgaggcacgagaatcacttgaacccaggaggcagaggttgcagtgagccgagattgcgccactgcactccagcctgggagacagagttagactccgtctcaaaaaaaaaaaaaaaaaaaaaaaaaaaaaaaaaaaaaaaaaaaaaaagtcatgctttggccagatctcagggaccccttggctggggctccatgcttagggatgggcaggctggaccctaggaagtgtccttgggttaaattctgggcgttagtaagttatatcccaggtgtatactcaggttagacacttggggtgtctagcgtagacccaggcaataaacaggctagagcctgggaaggaagtgggggccccgggtccatccctagcttagattcccagcatcaccccccgcccggccattcaaccactgcagccactggttacagggggaacgcaatgaattttgggggtgcgaggcctgtgtcatgattctgggcatggggctgtggatagacccaccacgtgatgagaaggctggccggatctgtcagcagaggcacggtgctgaccccgcccggtgccccagagccgtgcccagtgcccaaaggggtgctgtgcaccatcccggctactggaacccactgccaaggattttcttttccccatccaccactgctgagaaccaatcggccaggcccagccctgtccggtgcctgcactctgggacctctgctctgacttcatgcaaacctaacctaaccttcactggctccaaaatctccatttctggatcccagtggtctgaccccacctctcctcctagccaaggtcaggcaactgaggaatggagctatttggttttcctgcactttcccgcaaaggggaaaatggtacttcctgcaaagctctctttgcagcctgggggagcatcaataaaggtttgagaaatggatccaggctcctggctctggtgagctcttatttatttatgtatgtatttatttatttatttatgtagagatggagtctcactctgtcacccaggctggagtgcagtggcacaatctcagctcactgtaacctccgcctcccaggttcaagggattctcgtgcctcagcctcccaagcacctgggattacaggcgtgtgtcaccatgcctggctaactttttattttttagtagagacaggatttcaccatgttgcccaggctggtctcgaactcctggactcaagtgatctgtctgcctcagcctcccaagtagctgggattagaggcatgcacgaccccacctggctcaattttgtattttttatagagatggggtttcaccatgttccccatgctggtctcaaactcctgagctcaatcgatccacccacctcagcctcccaaagtgctgggattacaggtgtgaaccaccatgcccggccctctggtgagctcttctaagcttcatcccagaagccctggtgtaaaccttgtgagtgacccctgatctctctaagtgacctcatagtcctatgatgcttccaaacccagtgggtaacctgcactaggccaggagggcttgaaggtaggggcagttgtccactcagcactgttaaaattctcagccccctggcacagagtgtggttcagagggttctggggacacaggaatgggtcaaacccagtccttatccccaggacctccacattctggtctagctgggcacaggaacatgatccgtgcatggagcgggtagctgatgggcatgggggagccactttttgttggggtccagcctcaacactacccgtaggtagccaaagtccagtggtgacaaagaatgagaaaagacaaattaagattttaggcctggcgcggtggctcatgcctgtaatcccagcactttgggaggccgaggcgggtggatcacgaggtcagaagattgagaccatcctggctaacacggtgaaaccccgtctctactaaaaatacaaaaaattagccaggtgtggtggcgggtgcctgtagtcccagctactcaggaggctgaggcaggagaatggcgtgaactcgggaggcggagcttgcagtgagccgagattgtgccactgcactccagccggggcaacagagtgagactctgtctccaaaaaaaaaataaagattttaaagctggtccagggggccatttgccagagtgaaggctgcaaaacacccagagctctggttgcctgacaatttattgagaacggtcttttgatctaagaagcggctggtatgggatgaaacggtgaaggagggggagtgtacgtcattggaaagatctgtagcagtagcagttatatgaatttcctttaagctaaaagcatatgtctaactacgaagataatcttcaacttatcaggctgcagctggtggggactggttttacaaggagccaggatgtctggtcacattccaatgcttcaagggagtttttcagcccagagcattctgtgtaaagccgcagagcaggtcatgctctctggccagggaacttaatggcttggggagatgattctcctcaagggccccctactgtagggaccagccccacagggtcggtgggtttttctcccaatgtgtgaagatgagagattgtaaaaataaagacacaagacaaagagataaaagaaaagacagctgggcccaggggaccactaccaccaagacacggagaccggtagtggccccaaatgccaggctgtgctattatttattggatacaagacaagggggcagggtaaggagtgtgagccatctccaatgataggtaatgtcatgcgagtcacatgtccactggacaggtggcccttccctgtttggcagccgaggtggagggagggagagagagagagagaggagacagcttacgccattatttctgcatatcggagacttttagtactttcactaattttgctactgctatctagaaggcagagccaggtgtataggatggaacatggaagctgactaggagtgtgaccgctgaagcacagcatcacagggagacggttaggcctctggataactgcaggcaagcctgactgatgtcagaccctccacaagaggtggtggagtagagtcttctctaaactcccctggggaaagggagactccctttcccggtctgctcagtagcaggtgctttttccttggcactgacgctaccagtagaccacagtctgcttggcaacggggcatcttcccagatgctggcattactgctagaccaaggagccctctggtagccctgtctgggcataacagaaggctcatgctcttgtcttctggtcacttctcaccatgtcccttcagctcctatctctgtatggcctggtttttcctaggttatgattgtagagtgaagattattataatattggaataaagagtaattactacaaactaatgattagtgatacttatatacatatctatgatctgtatctagtataactcttgatattttatatattttattacactgaaacagctcgtgccctcggtctcttgccttggcacctgggtggcttgctgcccacaccctacatttttccataggtgtcctacacagggacgactgactaaactggcaccccataaacctttccaccagcacttgcccccttttctttttattaataactgccattgctatcatggcttgctcacagtgtctggcttctctcccaaggtgtcttcttcacctgtagactaaacataaacagcatagacaaacaaaaattaaagcaaagtttgcagcagttgatcccccaatggttttaatccatttcagaggattcaggtcagagaacccatcaatggttccattaaagacatcagcaccaggtaagaaagttaagtgggcttgagatgcctcaaaaacttgttcctttaattttgctatatccagtgtgggttcacgccattctcctgcctcagcctcccaactagctgggactacaggcgcccgccaccacacctggctaattttttgtatttttagtacagactgggtttcaccatgttagccaggatggtctcaatctcctgacctagtgatccgcccgcctcggcctcccaaagtgctgggattacaggcgtgagccacctttccctctaaatggtgtttaaccttatcccaatgaggcacagaggcattataagattgaggagtaatgcaaaaatcagaagtattccaatcaccctgcatttgtattctatgctccaagttcataattcgatcccccatccaccgtactgtttgacaaagatcgttaatttgattagttaatttttgatcaatttgcgtctgtgtattccaaagcttggaagaattcttttgctactggttaacataatcagcagtttgaacagaagaatgtaaagcaacacctgcggctgcggccgtggcggtaacagcaataatgcccatgattattgctataagagtaaaaataaatctctttgttctgtttaacattccctttagaatttcagttactatgtgtatagaaggagaggcttcccaaggtctattaagggaaacaggtatcccaactccctctcgggctctgacaagcaagatactgttattcttatcaattgtagaatcaatgcaagtgaaaagacaacagtcaagacatgatagagtttgagaatcaggtagaatattgatttgtcctactactaacataaaaggaggtttaacacaaccctgtaatggggttgtccgattggaggtcaaagctacaatatattgaagttttttactatgggtttattttttttttaatttatttacttatttttgagagagtctcgctctgtcgcccaggctggagtgcagtggcgtgatctcagctcactgcaagctccacctcccgggttcacgccattctcctgcctcagcctcccgagtagctgggactacaggcacctgccaccatgcccggctaatttttttttttttttgtatatttagaagagatggggtttcaccgtgtcagccaggatggtctcgatctcctgacctcgtgatccgcccgccttggcctcccaaagtgctgggattacaggcgtgagccactgcgcctggccgggtttatgttttatattctcctttccaaatctgtacggggtttggaccatcattaatttccacagttctgggtgttctgggcttactgttggatcaatcattttagggcgtggaggagccatactgctgccttcccagaagataggaaagtcgccttttattctgtacttttgggtaggtgcctcttcggaatagtcaactgggaagccgcgctcttgacatcccttgggccgtccagtacaatttactgcaaatcgccccttaggggtccagtcaatgacgattccataggagttattttccatcaccacggcactatttgcaatgcaatcttcccaggccagctcctcagcttccttagaccatactgtcaattgttctgggcattttttctttcttggtctaaattgattagtaagaatattagctacacgataggaatttcctgaggatatgactttagttttagattgaaagctccttccactaactatatgaatagaggcctctgacccattatgcgcagggacataaaccatccagctttgtttgtcataatctaaacatcctgctgcaggccccagacatacaggaggagagcgataaccaatggatgcatttattaacattccttcctcctctggatgaatagggccttggttatcagttggtccaggtgtccaaacactatcattaacgtaaacctcaaccgggggttccaaccaagtgacaggcctaattaaaggcgggaatgggccatatgcccaacaggtataattttgtgctgctgtagccccatggagacttaccaccatagcaattactgcaattatagccaccatcatgagtgaatcccaacttctcccccttttttgttttctgtgttagggttttttggttgcagggcgtagatatatgcagccacaggtttgtcaggcgaggaggtcactgctcttattccagctttgcatcccaggattagtaaataacagaagacaaacctgagtataattagcaacatttttttttccagtcaaagagtgacctgtagtgttacttggcatcttagtttactatacagtattaatgaggaaccccactgggggtatgttaatttattttagctaagcagttatgttattagaagctgaggggtggggggttgttaaagtaacagggaagaagaaaggcggatttaagatatgagcttaatagagtgtagtaggtataggtagtaggcaaagtgagagaattaaaaatgaatgaattatttggcttagtcttcgcttcttcagcacaatgtctggggcctatgttgtttgcggaagccgcatttttgaggctacagttcctgtaggatctttcttaggctggctcgaattttttcttctttccgtcatttgatgaggacgtagtcttcaggctggtactggaaattctaggagtggtgcctgtgctgagagactttttaccatctttaaagagcaggttagtgttttaagaaaaacttgtgctttattttaatgtttagtttatagaaaaactggatgatacctttttaactttagcaaatgtttacacacaattttttacaattatcattttaaaacttgcttagaccttcaaaacaaaaattatacaacctttcttgcacaaattcctttttataacatttttcatgactttcacagacaatcttcaacatgccttaactttcttcttttttttttttttctttttgagacggagtcttgctctgtcacccagaccggagtgcagtggcaagaactcggctcactgcaaactccgcctcccgggttcacgccattctcctgcctcagcctcccgagtagctgggactgcaagcgccagccaccacgcccagctaattttgtgtagttttagtagagacggggtttcaccatgttagccaggatggtctcgatctcctgaccttgtgatccgcctatctcggcctcccaaagtgctgggactacaggcgtgagccaccacacccagccaacatgccttaactttgtatgttttataactttccttactaaaggtacatttttataactttcttaatatttcctttcccttcttcctacttcatttctttccttagtctttctttttgcatctttttctgatttctgtctcttctagtctctctcttatttttttctatttctctttctaatgtacaataattagatgagtgttggtaacaatggatatatgtacatatcttagtttccaaaatttagggatgtgtttaacatctgtttgccacaactgattaggttccaatcctctagggttaacacctgtttaaggaggaaacgtgcctgtcagctggtaatctgggcattgtaggataatttgtttagccagtctctgggctagttgaaattgtttagataagtttctccaattttggtggaaaaattgatgtgattgggtggcttggtcaagcagtgatgtcataacctgaaggtctgcttgatcttgccacaagccaatgggccaggcagagatctgtgggctcaaacgtgtgtaataaaaataggatgtgtaccttggtccggcaattgctgaagttgaagaaaaagaggcacacagagtgggctccagagcgaacttaaggctgtaaaagtaatttaataaataaacagaacagcctcagctctccgaatgctagtaaatttagatccagtgattggattacgtggtctccaccagactgccgcttttccatctttaccagacccattagtaaaaccagtcacagctcccgccgggcgcggtggctcatgcaggtaatcccagcactttgggaggccgaggcgggcggataacgaggtcaggagattgagaacacggtgaaaccccgtctctactaaaaatacaaaaaaattagcagggcgtggtggcaggcgcctgtagtcccagctactggggaggctgaggcaggagaatggcgtgaaccgggaaggcggagcttgcagtgagccgagatagcgccactgcactccagtctgggcgacacagcgagactccgtttcaaaaaacaaaaacaaaacaaaaaaaccagtcacagctccttccaaaggggcatcacgagtaattttcggaggaacccatgtagttaattttaagaactggaaagttttatttttaggataatgattatcaatacatccaacaaattctgctaaataaacttgccatgtaactgaattaataaatgcctgtttaacctgatttttatttataggaactataatcttattaggttcagtgccacaaagtttaacaactcgcatacgagcctgtccaattaaaattgccatctgatctaaatatactgtaagtgtttttatggtattacgtggcaaaaaggactattcaactaaatcattattttgaacaataatccccgttggggagtgtgaagtagggaaaacaatgaattgtaaaggcaagtctgggtcaatcctactgacctgggcttgcggaattttttcttcaattactcttaactctttcatggcctcgggtgttagttctcttttactgtgtaaactggagtctcccctcagtattgagaagagattagacatagcataagtaggaattcctaaggtgggccgaatccaattaatatcgcctaacaatttttgaaaatcatttaaggtttatttggtttttgtttttgtttttgagacggaatcttgctctgtcccccaggctggagggcagtggcttgatctcggctcactgcaagctccgcctcccgggttcacgccattctcccgcctcagcctcccgagtagctgggactacaggcgcgcagccaccacgcccggctaattttttgtatttttagtagaggcggggtttcactgtgttagccaggatggtctcgatctcctgaccttgtgatccgcccgcctcagcctcccaaagtgctgggattacaggcgtgagccactgcccccccgcccatttaaggtttttaaagaagcttttctaatttgaaccttttgaggcttaatgctctatcctgtacttgcattcccaaatactgaaaaggagtggttgtttgaattttgtcagatgctttaagcaatccagcgtttgtaattgccttttgcaaagatgaataacattgaataagttggcctctattttttgctgcacacatctggaaattgatctctaacaggctggatagttctgcctacaaaagtctgacaaattgtgagactgtttaacataccccgaggtaaaaccttccaatgatatctggctgcaggttctttattattaactgcagggatggtaaagccaaatttttcgaaatctgcctctgctaaaggaattgtaaaaaaaaaaaaaaaaaaaaaaaaaaaaaaaaagcaatcttttaaatctataataacaagcggccagtctttagggattataatgggggatgggagccctggttgtaaagctcccatcggttgaattacagcgttgaccgctagtaaatcggtcggcatgcgccatctgccggactttttcttaattacaaatactggggaattccaaggagaaaaagtgggtgtgaaacatgtcctttttctagtaattctttaactatttcataaagcgcccccaatttttccttagggatcggccactgttcgacccagacagggcgctgggtcatccatttttaagggaaattgctccttccccgtaatgaacggcagggcgagcctgaattttaattaactggtggctgagcctgaatcatccctttaccgtaattaacggcaggttttgcaacaatgggcgcggcgaaccgcgtctcaggcttccatgcccgcaattcacaaggcttaggcgcgggtggccattccggagcttcccctgagggtgcggtaggttggacggtctctttcatatgtgtttggttagcatatataacctcctgattctccgccttttttaaactggagctagatggtgcactctcctgaccgtcaaactcgtctccttcatttccaaatgctggttcctcctcagtctgcaaaggctcacgtgctgttttcactgccgcccacacagaccaagcggagaaaggaatttcttgaccctctttttgtgcctgtttgaagtcagcccttattttttcccagtctttcaaatccatggagctgtgttccgggaaccaaggagaatattgttctattagctgaaacagggacagaagattttgggtgctcacgtttaaccacagtggcacaataactgccgcaccaaactcaaataattattatgtctactctcagcctgacccacaatttcctgttgttaccctggaattctccgagcgccccgcttacctgcagagcttaaaagtcttttcgttggccggcgcggtggctcacgcctgtaatcccagcactttgggaggccgaggcgggcggatcacgaggtcaggagatcaagaccatcatagctaacatggtgaaaccccgtctctactaaaaatacaaaaagttagccgggcgtggaggcgggcgcctgtagtcccagctacttgggagctgaggcaggagaagggcgtgaacccgggaggcggagcttgcagtgagccgacatcgagccactgcactccagcctgggtgacagagcgagactccgtctcaaaaataaataaataaataaataagtaaaaattaaaaaaaaacttttcgtccttgggagttctccatctgtcggtccttcattttcgacgctcctgcattccttcacccggttgttttggagataccacgttgggcgccagatggtggggtccagcctcaacactacccgtgggtacctgaagtccggtggcgacaaaggaatgagaaaagacaagttaagattttaaagcaggcccagggggccagttgctagagtgaaggctgcaaaacgcccagagttctggttgcctgacgatttattgagcacaatcttttgatctaagaagcagctgggatgaaacggtgaaggagcgggagcgtacgtcattggaaagatgtagagcagtggcggttatatgaatttcctttaagctaaaagcatatgtctaactgctaagacagtctttaacttatcgggctgcagctggtgggggccggttttacaaggagctaggatgtctggtcacgttccaacacttcaagggagtgtgtcagcccagagcattctgtgtaaagccgcagagcaggtcatgccctctggcctgggaacttaatggcttgcggagatgattctcctaagggccccctacagttttccataggtgtcctacacaggggtgactgactaaactggcaccccataaacctttccaccagcacttttgtttcaggctgctggctctggtgagctcttcttttttgttttgttttatttatttatttatttatttatttactttattttttttgagacacagtctcgctgtctcccaggctggagtgcagtggcgtgatctcagctcactgcaagctccacctcccaggttcaggccattctcctgcctcagcctccggaacagctgggactacaggtgcccaccagcacgcccagctaattttttgtatttttagtagagacggggtttcaccatgttagccaggatggtcttgatctcctgacctcgtgatccacccgcctcagcctcccaaagtgctgggattacaggtgtgagccaccgcgcctggcctcatttatttgttttttagatggagtctcactctgtcacccaggctggagtgcagtggcacaatctcagctcactgcatcctccacctcccaggttcaagggattctcgtgcctcagcctccctggtagctgggattataggtgtgtgtcaccatgcccggctagttttgtatttaaaaataggcaggattaaaaagtaggtggggttgatccaaccattatctacatgattgaaccccaccttcagccccttccccttcctggaggtcaggtggctaaaaatcccaaccttggtggttggtgtttctggcatgaccagcccccatcctgagtcacctccttggtataagctcagttatggtccagggcccccatgaataataaagacgcttcttttttttttttatttccataggtttgggggaacatgtatttggttacatgattaaattccttagtggtgattcatgagagtttggtgcacccatctcccaagcagtatacactgcacctaatttgtagtattctatccgtcagctttccaccctttccccttgagcccccaaaatccactgtgtcattcttatgcctttgcatcctcatagcttagctcccacttatgagtgagagtatacaatgtttggttttccattcctgagttccttcacttagaataatggtctccagtcccatccaggttgctgcaaatcccattaattcattccgtttcatggctgagtagtattccattttatatgtatgccacagtttcttcacccattcgttgactgatggaaatttaggtttgttccacgtttttgcacttgcgaattgtgctgctataaacatgtgtgaacaagtatcttttttgtatcatgacttcttttcctctggatagatacccagtagtgggattgctggctcaaatggtagttttacttttagttctttaaggaatctccacgctgttttccatagtggttgtactagtttacattcccaccagcagtgtaaaagtgttccctgtttgccacatccacaccaacatctattattttttgagtctttgattatggccattcttgcaggagtaaggtggtatcacattgtggttttgatttgcatctccctgatcattagtgatgttgagcatttttccatatgtttgttggccattaagacacttctattacttggaaaattccaagagtttagacgccccctgccaggaaccagaggtagtgactagacagattatttagcacacaatatctttctatcttaaaatcgcaatcatatctgcaaagtctctttttgccatataaggtgacattcataggatccagggattaggacttggatatcttttttttttttttttttgagaaggagtttcactcttgttgcccaggttggagtgcaatggcatgatctcaactcactgcaacctccacctcccaggttcaagtgattctcctgtctcagcctcctgagtagctgggattacagacatgcaccaccacacctggctaactttgtatttttagtagagacagagtttcaccatcttggtcaggccggtctcgaactcccgacctcaggtgatccgcccgcctcagcctcccaaactgctgggattacacatgtgagccaccatgcctggccaggacttggatatctttgcaggccatcatgcatcctagctcaaagagtaactagctgagaaagactcccaggtgggggatggaagtcgaaatgcgtacctggtggcctaactgcttgctgagctgggttaagtggcaatttggaagatccacagacagatctagtctaacttactgatgatcaagtggagatctctgactcactgaacagcaacagagacgaactgacaggattgacttccaggctgactgacaacctcaacggcagagcctcttccaggttgtagtgacaaatgtacaatggaagcacaggtggacaggagaagcccaggagtctcttcctgggggtggagctgagtaagtaccggctgtggctggggcagaaggaagaggcccccaggttaagctggaacttccccaggatcctgtccatggctcacgcatgccctcgagcccctggtactccaggcttagatgctggggcagcagggctggagggaacctcagggcaggagcccagagagccaaataactggattcaaagggtccatcctcccttcaccattggcctcaggcatacctgatcaatgcacaggtcccagcttgcagtctcctggctctaactggctggtgttagagcagatccataaagaccccaaataagagagtcaggaccaaattgtcctccctggcccttggccccagcccacccccctgccccactccccaacacacaagagtcaaccttccagggaagaaaggaatccctggagcctatccctcatcctagaacagatattcagtcagcttttatggtcctggaatattggtcttgctagaaagactattctaaatgccaacagctggccgagtgtgatggctcatgcctgtaatcccaacactttggaaagctaaagtcagtggatcacttgagcccaggggctcaagctcagcctgggcaacatagtgagaccctgtcactataaaaatagttttttttgaggtggagtctcgctctgtcgcccaggctggagtgcaatggcgtgatctcggcttactgcaacctctgcctcctgggttcaagcgattctcctgcctcagcctcttgagtagctgggattacaggcacaccccaccacacctggctaatttttgtatttttagtagagacagggtttcaccatgttggtcaggctggtttcgaactcctgacctcaggtgatccacctgtctcagcctcccaaagtgctgggattacaggcatgagccactgtgccaggcctgttaaatgacttttctaaactacttctgtaaagtctatattctctgtcatggctactgaagtctttgctcagttagcttcatggttagctagtggttggacagagatttccttgaatgtctggaatcggaagtctgccagtctttgccagggagctctgtgtacttattagggacacaccttcaacattcacccaggaaatttacaactgtgctttagctctcacttcctgcttacacagagcctcgaagtcggccagcggtgtgagcttagggctgtctcaggtctttcctaagcatgtggccttccatatccccagaaatatgtcagaatttttcaaaagtccctccgaacatctaatgtcttcatttttccttctaagattttttttttttttttttttgagacggagtctcgctctgtggctcaggctggagtgcagtggcgcgatctcggctcactgccagctccgcctcctgggttcacaccattctcctggcttggactacaggcgcccgccaccacacccggctaattttttgtattttcagtagagacggggtttcaccgtgttagccaggatggtctcgatctcctgacctcaagtgatcctcccgcctcgacctcccaaagtgctgggattacaggcgtgaaccaccgcgcctggcgcttttccttctaagatttttagttaggctattatttccccaactgttaagtattgccacaggcagctgcaatgttaaaacatttaacaaatagcccctggggagaaatgtttagcatccggcaagttcaagtgaggtcaggtctttcagagcagggtcttccagagtaccaataaataggtcaataaatgactcttcttggctgggtgcggcggctcacgcttgtaatcccggcactttgggaggccgaggtgggtggatcacttgaggtaagcagtttgagactagcctggtcaacatggtgaaaccctgtccctgctgaaaacacaaaaatgagtcaggcatggtggcgggcacctgtaatcgcagctactccggaggctgaggcaggagaatcgcttgaacccaggagaaggaggttgcagtgagccgagatcacgccactgcactccagcctgggcgacagagcgagactctgtctcaaacacacacacacacacacacacacacacacacacacacacacacacacacctcttcttgaatgatcctgaatgaggttttgaaggagccgcacctctgttcttttccgtatggtatcaagattgtgggctgttatttttcaaggctaccctctgagctggagagccaggaataagactagagtgagttaaaattctacagagcttgctgtttttttatgtgtttttttttttaattaaatgctctgcaaattactgtaagcttttggttaatttccagagttgtgaaaatgttgattctgtcaaattttgccagtttttttcattgcttttgtagaaaggcaaattttactctgccattttgctgacgttcttttttttccccttcgatgcttaaattatctttaatttggccagtgaaagcttttctctctggcttctgggtccttttgacatattcctattggttttttgctgatcgttttttcttccttcctggcctaactagatgttctaggcttttgtcccccccaaccctgcctcagcctcccaagtaactaggactacaggagcacgccaccacgcctggctaatttttaaattttttgtagaaatgggtcttgctatgttgcccaggctgctctcatttttccaaaaagccctgggctaggtggagattggcagttagaaatgatctgggtgttaagtgtgcccattgttactggggtatgtggctcccaggtcctcttagtagataaatgggaacacacacacacacacacacacacacacacacacacaaacttatttctatatttatctttatattttgaaaaccatgaattcacctcagtacctccaattcaatagggtttattcttgtttttttttgtatcttttcttttttttttttcttgagaccgagtctcgctttgtcacctgggctggagtgcagtggcgcaatctttggcagtctcagctcactgcagcctcaacctgctgggcttgagggattctcctgcctcaggctcctgagcagctgggaccacaggctcacggcaccacacccagctaattttttgtctgtaaagacagggtctcactatgtttcctgggctggtctggaactcctggactcaagcgatcctcccaccttggcctcccaacgtgctgggattacagtggccgggtgcagcggctcacgcctgtaatcccagcacattgggaggccgaggcaggtggatcacccgaggtcaggagttcgagaccagcctggccaacatggcaaaatcccatctctactaaaaatacaaaaattagccgggcttggtggcgggagcccgtaatcccagctacttgggagcctgaggcagcagaatcgcttgaacctgggaggtggagtttgcagtgagccgagatcttgccactgcacccagcctgggtgacagagcaagactctgtctcaaaacaaaacaaacagaaaaacaaagtgctgggatcacaggcataagccaccacacctggcctctgcatctcatgagcatttattttgtgctatgtgttttttggatatgacctcaaagaatccggtaacacagccgccctcattctcattttacctatgagcatagtggctcagagatgagtcacctgcccacagcccatcagctgataaacactggagttgggtttgaaactgtgaaagcaatgaggaccacatcattttcacttcccttcgtggccccaactcaaaccaacccaaaacccaagaaagaagatgtggagattgtgttgcctttcataactgggaagcgcgggtgagtggaggggaccagattcaggatctgcttttctttctttctttttttttttttttttttttgagacggagtcttgctctatcgcccagtggagtgcagtagcgcgatctcggctcactgcaacctccacctcccgggttcacaccattctcctgcctcagcctcccgagtagctggggctacaggtgcctgccaccacgcccggctgattttagcatctgcctttctttatctgtctatgatctgtttgctccagaatgtaaccttctagaccaaaggttggcaaacatttgaaaagggccaaatagtaaatatttttgggcctcgagggctctctgctgcaactctgctattctagcacaaatgcgtcacatacaatacataaatgcatgggcagaaaacaatttgttagccgggcacagtggctcacgtctgtaatcccagcactttgggaggccaaaacagattagggttttccaaggctgcaggaaggcaggaatgtggagtgactgcttagtaagtatggggggctgggcatggtggctcacgtctgtaatcccagtaccttgggaggccaggggaggaagattacttgaggccaggagtctgagaccagcctaggcaacatagcaaggccccatctctacaaaacatttgaaaattagctgaccacggtggcacatgcccacgtccccagctactcaggaggcagaggtgggaagattgcttgagcccaggaggctgaggctgcactcaaccatgattgtgccactgcagtcaccctgggtgacagaagaagaccctctctcaacaaaaacaaaaataaataaataggccgggcgcagtggctcatgcctgtaatcccagcactttgggaggccgaggcgggtggatcatgaggtcaggagatcaagaccttcctggctaacacggtgaaaccccgtctctaccaaaaatacaaaaaattagccaggcatggtggcaggcacctgtagtcccagctactcaggaggctgaggcaggagaatggcatgaacccgggaggcggagcttgcagtgagccgagattgcaccactgccctccagcctgggcgacagagtgagactccgtctcaaaataaataaataaataaataaataaataaataaataaataaataactatggggtgtccttttggggagatgagaatgttctggaactaggtagtagggatggttgcacaacattgtaaatgtactaaatgtcactgaattgtatactttaaatggtatgctttaaatggtaaagtttatgttatgtgtattttactacaatagaggaaatgaagggaatccttcaggatgaaatgaaagaacactagacagtaactcaaatccatatgaaaggccaggcgtgatgactcttgcctgtaatcccagcactttgagaggccaaggcccacctgaggtcaggagcttgagaccagcctggctaaacatgatgaaaccccgtctctaccaaaaaatacaaaattagctgggtgtggtgtcgtgtgcctgtagtcccagctacttgggaggctgaggtaggagaatcacttgaaccccgttgacgtgagctgagatcacaccactgccctccagtctgggcgacaaagtgagaccctgtctcaaaaaaaaaaaaagtccacatgaagaaataaagaaccccttcccaccactggcattttccgcaactgcctcccatataaattcctcttgtcctcaaatttgggtctgcttagtgtactgattaagcatggacttgtgtcaacttgcctaggttcgaatcccagccctaccacttacaagctgtatgaccatggtcaattgttaacctctctgtgtctcaattttctcctctgtaaagcaggataataactgtgcttttcttgtagtgttattgtgaagactgttagtgtctccctcacccacccagtcaaaaaacaccagaatcacacatgtggttgaacaaatgtctttgcctcccctcccctcccctcccatcctctcccctcccctctcttttcctttttctttgagacggagtctcgctctgttgcccaggctggagtgcagtggtgcaatccggctcactgcaacctccacctgccaggttcaagcaattctcctgcctcagcctcctgagtagctgggactacagatgcgtgccaccatgcccggctagtttttgtatttttagtaaaaacagcgtttcaccatgttggccaggctggtcttgaactcctgacctcaagtgatatgcctgcctcggcctcccaaagtgctggaattacaggcatgagccaccatgcccagccagttgaaaaaatttcaatgtattacttgtcacagcgaaggagaatacacaccacgggtagctgttactgaaacaccagttcagtcggctgcttgccacacagaaagccaatcactgagacactagtattgcccatgaagaaggctttaattaggtgccaaccaaggagatgggagatcagtctcagatctatctccctgactgattgaaattaggagtttaggctggacgtggtgacttacgcctgtaatcccagcactttgagaggccgaggcaggcggatcacctgaggtcgggagttcgagaccagcctgaccaacatggagaaaccccatctctactaagaatacaaaattagcctaggggtggtggcacatgcctgtaatcccaactactcaggaggctgaggcaggagaattgcttgaacctgggaggcagaggttgcgatgagctgatgtcgtgccattacactccagcctgggcaacaagagcgaaactccatctcaaaaataaattagttaattaaaaattaggggtttatatagcagggaagaaatgtgacaatatgtgagaaaacaacagttaggtaggggtaaggaagagaagttggtcaacaggaagcagatcgtcaattgggcaatcatgatgggtgaggggtctgacatctcattgtccaggtgtgatctgctaagtttcagctccttgatactatctgggagtcctgatggttcgtttcctgggaaaggaactcagataagacaaatgtaactttctcaagtcaattctatgtttattgaaagaaactattaatataagttctatgggatgatggggctagtttcataaccatggggtatctcagtaggagagtgtaataaatgacttattatatgattggggcttgtgttaagttctttaggggaggattctaggttggatgctatcaggaagagggggtaatcttatgactaggcattctaataagtcttttaatttaattttttttttgagacagagtcttgctctcttgccgaggatggagttcagtgaggcaatctcagctcatggcaacctcctccccccaagtagctgggattacaggctcctgccaccacggccaggtaattttttgtatttttgtagagacagggtttcaccatgttggccaggctggtctcaaactcctgaccttaagtgatccacccacctcggccttctgaagtgctgggattacacgcatgagccactgaagaacaaataaatcttatatgcaaggagtaaagactagactgaggctaaagccatgattgataaaagagagtgctatgagctgagtgtttacctctgaaattcatatgttgaaatcctaacccctaagatgatgttattaggaggtggtaatttggggttagtaattaggtcatgaggtcagagccttcattagtgtcctcataaaagaaaccctagaaagcttccttcaccctttccaccatgtgagaacacagcaagaaggcaccatctatgaatcaggaagcaggctctcaccagccaccaaatgtaccagcaccttgatagctggaagtgctgggcaaagttctagcaatgctatgatcagctgcaggaccagaccagctcctagaacaccatggtcacctaggaaggccagggcagctcctaacaacaccaaagccagctgtgagcttcaggcctgctcttgaccactcttcttctctcgggattaaactagctatgttatgtagagcatgtagaacaatgtctgataaatcttttatcgagacttgctctttctagcctccagaagtgtgagcaataaatttctactgtttataatccacccagcctatgatgttttattagagcagccccaacagactaagagagaaaggttgttccaattagccagaatataggaatgtttggttatgtctggtttggacagtgctcacattttgtctgtgttcagacatgcttacagagtgatctcacttttgtcttgctatgtacacatttacagctacaaacgtttttgcttgatgttgatgttctgtgaaattgtttatattcaagaggacaacatcataacctaggtggaagtgctgggtaaagttctagccatgccatgatcagctggaagaccagaccagctcctagaacactctggccacctaggaagcccagggcagctcctagcaacaccaaagccagctgtgagcttcaggcctgctcttgaccactcttctcctctcaggattaaactagctatgttatgtagagcatgtagaacaatgtctgataaatcttttttcgagatggagtctcactcactctatcacccaggctgtttgctcactgcaacctctgactcctgggttcaagcaattctcctgcctcagcctccccagtagctgagattacaggcatgcatcaccatgcccagatagtttttgtattttttatttttttaatgttttagcaaactttgttgtacagaacaaaaaaaaatacatcatgattctgcatgattttctctcccacaaaagcatgggtgaaaaccagtaacttacttataaaaatattttatttaggactctaataagataatatgtacattcataccttgtctcctgagtatttaaatggggaaaggttcacctgaaaaaagttttccccaggaaacccatagtttcttggctcaactgacccattaaaaaagtccacctagagccaggtgcggtggctcacacctgtaatcccagcactttgggaggccaaggcgggcagatcacgaggtcaagagattaagaccatcctggccaacatggtgaaaccccgtctctactaaaaatacaaaaattagctgggcgtggtggcataaacctgtagccccagctaatcaggaggctgaggcagaagaatcgcttgaacccaggaagtggagattgtagtgagccaaaatcatgccactgcactccagcctggtggcagagcaagactgtctcaaaaaaaaaaaaaaaaaaaaaaaaaaaaaaagtccacctaggcggggctcagtggctcatgcctgtaatcccaacactttggaaggccaaggcaggtggatcacctgaggtcaggagttcaagaccagcctggccaacatggtgaaaccccatttctactaaaaatgcaacatttagccaggcatggtggcacacacctgtaatcccagctactcaggaggcagagacaggagaattgcttgaacccggaggcagaggttgcagtgagccgagatcaaaccattgcacttcagcctgggcgacaagagcaaaactctgtctcaaaaaaaaaaaaaaaaaaaaaaaaaaaaatccacctgtatcaactttctgccagtctggagaagatttgttttctttgatctgacatcatgtgttcacaagcttccaaaatgtttgccaaaattaaagtttgatggatggtttttgttttgacccatattcttccattcattccaaatactatctccagggaataaagttttcccacttcctgtatgattccacaacctggagttaatagctttctaactaagcccaaagtcactttaaaaagcagaccatcagggccaggcacggtggctcacgcctgtaatcccagcactttgggaggcagaggcacgcagatcatctgaggtcgggagttcgagaccagcctgaccaacatggagaaaccccgtctctactaaaaatacaaaattagctgggtgcagtggcgcatgcctgtaatcccagttactcaggaggctgaggcaagataattgcttgaatctgggaggcggaggttgcggtgagccaagatcacaccattgcactccagcctgggcaacaagagcaaaacttcatctcaaaaaaaaaaaaaaaaaaaagcagaccatcctgtccaatgacacccattccattggctcgtcctcagctgtcaatacacaccatctctagttccatgtctttattagcaaccacaaagtggccatagatgagatctccaacctacacatatggtctgtttcttttagttgcaccttcaaacgccaagtaaaacaaagaagctggctcactccctccaacatcagctctgaatgtatctccagatttagctgtcactatgccaatcacatggtctcctttcactcgaacatactcattcccggggctgcagcacttccaacccggcggtgtctcagctttcccagtcctcgttcttgtgttttttagtagagacagggtttcaccattttggccagtctggtctcgaactcctgacttcaagtggtctgcccacctcagcctcccaaagtgctgggattacaggcatgagccaccgggcccagcgtgataaatcttaagtgctgtaattactgagtatccatcattcaaataggcaatttatacctattactagtgcactgtattaaaactcatagtaacatggccaggcatggtggctcacacctgtaatcccagcactgtgggaggccaaaacaggtggacccacctgaggtcaggagttcaaggccatcctggtcaacatggtgagaccccgtctctactaaaaatacaagaattagccaggcatagtggtgcgtgcctttaatcccagctactctggaggctgaggcaggagaatcacttgaacccgagaggcagatgttgccgtgagctgagatcacaccactgcactccagcctgggagacagagcgagactccatctcaataaataaacaaataataaaaaataaataaaactcacaataacagtgtgaggcagtgtagttgtctcatttcacagctgaggaaactgagactcccaaaaagtgaggctcaaggtgtcagcgttgtatatgggttcagatagagtcttttggcactggaatttactggatagtttctgcctgccctctaaatgactctcctctgtgtcaggtgcttcatctctcaccccacttttcaggaagggtgtgtctccatcctgttccttattcttcttcctggcttggagagatgtgattctgaggggctgcaatgcatggggttataaaaacccacagtccagagaggggatggagagagaagggagtagagaggagaagatggaggaagtgtgcgagcccaaggggccaggcaaccctggtgaggctgccccaccccttccgtgggatgttggtagtgaaacagaaaaggttcccttgtcccccttgcagggcgtgtgacggggggtgtggctcacatcttctgtgccccgctgctcaaacctccaggggaagcatgcagacaggcaggttgtggggctccaaccccatggcagcgtctaggggtgaatgctttacagctcatgagggccccgtgggaatgtgttacagcgtgctctttcagttttgccgtccgcaattggctgatgttcatcagctcagttagatgctctgccttattgcaaggacagacgactttctctctcccagggttcttgccttagtgaactggaaaaattggatcccatgtgatccaattgggtgatccgattggagggtgggtgaaagtttttttatggagtggtggtagccctcagtgaggtgcttttctgtttcactgtcaacatcccacagaaggggtggggcagcctcaccagggttgcctggccccttgggctcacacacttcctccatcttctgaacccatatacaacgctgggagtggtggctgtagtcccagctacttgggaggctgaggtgggaggatcacttgagcccaagagtttgaggctgcagtgagctatgatcacaccactgcactccagcctgggtgacaaagtgagacctcggtctctacaaaaggaaagaaataaaagaaaaagggctgtctagcaaagacatggaatcaacccatcaatgatagactggataaagaaaatgtggtacatatatacaatggagtactatgcagccataaaaaagaacaagatcatgtcctttgcagggacatggataaagctggaggccattatccttagcaaactgatgcaggaacagaaaaccaaataccgcatgttctcacttataagtgggagttaaatgatgagaacacatggacacataacggggaacaacacacactggggcctattgcagggtggagagtgaggagggagaggatcaggaaaagtaactaataatctgtacatgtcatatgttcacctgtataacaaatctgcacatcccacacatatacccctgaacttaaagtttaaaaaaaatcacatcattactctttaaaaaaaaaaaaagaaagaaagaaagaaaaagaaaaagggttgtcacttctgccttcatctgctccctctaaccctctgatggctgccccacctgccaccactttcctgaaatgaccaaggagagtaactaccgttcctttgtgaaagccaaccagacttgtttctatcttgtttccactcattaatggggtggccactccctccctcctccttgaaactcctctctcccaagacttccctgatggcctcacctcctggttctcctcctgtctgcctgaccgctccttctccatctccttcatgggctcctcttctgcctgccctcaaaatgtccctgtcatttacaagtctttactatccaaattcactcctgctactgggaaggcaagaaggaaagacagtcacagctggactgtctttcaagtttctccagagctggagccagtgaggttacactgggtagcaaagtcagaggaaggagccaaggcaggaactaagtgagaaaccaaccaagttccaatcagccaagagtgaaagtccaaactggttgtagaaactaaatggccatggctgggtgcagcggctcatgcctgtaatcccagcactttgggaggccaaggcgagtggatctcttgagtttaggagtttgagaccagcctggggaacatggtgaaacctcatctctactaaaaatacaaaaattagctaggcatggtggtgcatgcctgtagttccagctactcaggaggctgaggtggaaggatggcttgagcctgggaggtggaggttgcagcaagctaagattgtgccactgtactccagcctgtgtgacaccatgaggccctgtctcaaaaaaaaaagaaaaaagaaagaaactaaatggccacaaggtagggtatggagacaaccagggtgagcccataaaactatctgggcctggtgcctttcttcttattagatctctaattaccttcttttcagctgttttcaaattgccaaagcatccacaaagttgccagatctagtcagcctgcaagctgaccacagatgggctcctataatatctaatctgttcaggtttcctatttcagatgatttgtatcactctgtgattaatttccaaattattactatgtttgtttcaactccgcctccccccaccccacacctaatagttattgattgccacaaacaaattgccacaaatggcccagcttaaacaacatacatttattattttatagtttttatgggtcaggaatctgggcatgacttgcctggatcctttgcctggggtctctcataagacggcaatcaaggagatggccaggattaaggtttcatctgaaggctcaactggggaaggattcacttcctagctcactcatgtgactgttggcagaatcagttccttttgtgctgttgggcaaattatctcagttcctagctggctgttggccagaggacaccctcagcttattgccacatgggtttctccaacatagcaacttgcttcatcaaagccatcaaggggaaaagtctgctagcaagatagaagtcagaatattttggaatataatctcagaagtgacagtttctcaatgatgaagtattctattggttagaagcaagataatcaccagtagaggatcacagaaggccatgaatactaggaggtggggaccatttcagaagctacttactacaccccaccagcatataaatatataagtctattagagcaggaacactttggttcatgttaaccatcacttctccagtgttttaatgagtgaatggaggctgggcatagtggctcacacctgtaatcccagcactttgggaggctgaggcaggtggatcacctgaggtcaggagttcaagaccagcctgggcaacatggtgaaaccctgtctctattaaaaatacaaaaattagccagacatggtggcgtgcacctgtaatcccagctactcaggaggctgagacacaagaatcacttgaacctaggaggcagaggttgcagtgagctgagatcatgccattacactccagcctgtgtgacagagtgagactctgtctcaaaaaacaaactgaaaaaagagtgaatggcatatagtaggtgataaattaatattggtgaaatgaaagattcaatggggtaagctatgtggtcttagagtggaatagctagagattgcttcaattcaacaattttttattacgttcaggaattctattcacagaatagtcaaggagcagtggatgggtgtaattgtcatgacaggtaaaaccaggggtgataaactgtggggtgaacacagacatagaagagtcactggataaatctgctggcttgcatcactgtgtaggggtcctggatgtggtcggccaatattaggcttagtgagtatgcttgtaggcatacacctacaaggatgtatcagttcgctattgctgcataacaaaatgctcccaaaattaatggcttgggctaataatttatttggtacatgattgtgtggttcaccaatttgggtcagattcagctggaaagttcttctgggtatagctgggctcatttatgcatctgtggtcagctgatggattggctaaatctggctactcttgaatgctttggcaacttgaaaatgtagctgaaaatactttaacaaagctcttcttgagaggcaaactcactatcccctccccttgaatctgagcaggcttggattgcttcaaccaatagagtagagcagaagtgatattatataacctccaaggctagatcataacacatcatgcaagcttctgtcttgtttgcaggaagattcacttccagagccttgagacaacatgtaaaaagttcaactaccctgagactgcagtgatggagatgtcatgtggagagaccacatggaaagtccctgaagctacaggaggagagcgagagagagagagaaagagatcgatcccccaagagacttcaatcatttgagtcatcccagcccaggaaccagacatgtgaatgaagaagctaccagataatcccagccaccagataccagctcccagccactggaggcactcccccactcttcaagtctccccaccttaagccctagatgtcatggatcagagacaaaccatccccactatgccctgtccaaacttcagacccacaaaaaccatgagcatattaaaaatgattgctgttttatgccactgagttctcggatggtttcttacacagcaatcgaaaactggaacacggctgggtgcagtggctcatgactgtaatcccggcactttgggaggctgagacaggtggatcacctgaggtcaggagttcaagaccagcctggccaacatggtgaaaccccatctctactaaaaaaaatacaaaaaattagccaggcgtggtggcgtgagcctgtaatcccagctacttgggaggctgaggcagcagaattgcttgaacccgggaggcagagatggcattgagccaagaccacaccattgcactctagcctgggcaatgagacagaagctgcatctcaaaaaaaaaaaagaaagaaagaaagaaaaaagaaaagaagaaaggaaactggaacagataacctcactcacagctggaggttggtcggctgacagtttaggccatgagggtgactgagccatgtgcctctcacctttcaggctacctctggcttgttcacatgatggttaagagtggcaagatcagtgcaaaatgacaaagtagacagttccaagcccgcgttccccacagaaacatcaaaaaacaagcagaaactgtcagatacaactttgtcagaactctgggaaacagtcaaaggtttacggtagtccagtgaatgctgaatcaagaagaaagacaacttcaaaatgatcaaaagcttttgatatttcgacttgcgtttgccccacttgccactgccctcccttgtgtgacagcagtagtgggaagagggaagcccacactcccagcatgagactctcattcctccttccagagggagcagagcagactttatttgtagatgatagtgtatgtccgctctaagctgtctgggagccacctgaaggacaaggtgctcatctctggtcttcctgcctcggaactcaggctggaaaagtggtggcactgctcaaaaacactgcaagccaaactaacaaaccacagatgtctgttccaaagattacaatcaaaacacacaatagacggcctaaggctcaggagcaaaagctggggagagtttcctggggaaattagaagcacctgcatgcatagggggatttataaacacagggttatgcccacagcaagatgcatgctcagaaaagacctgagaagaccctaagttatgctcagctgatccctaggctcagggcaagctgggttaaatgttgaaagagtgctccagcacagggccaatctgcaaagactgagcgagggaaagattttttgtttggttggtttgcttgcttttttagctcctggtattcaagaaaatctgtcaaaacactagctgaacacaagctaaggaatagagacttcagtgaccacatgcgacaagtaatatagtctttgcaagaatagttttggaaagtcattaagccaaaactactacggtctttaacaataaaacaaacaacaaaccagcaaaccctgggacagtgggagaatctgacatccaaatttatcacattacaaatattcaaatgtccagtttttaacaagaaaaatcacaaggtatacagagaaaaaggaaattatggcccattgaaaggggaaaaaaaataacaaattgaaaggaattattcctgagaaagtccagatctgagacttactagacaaagactttaaaataattgtcttaaatatgctcaaagagctaagggaaaacatggacaaaaatctaaaggaaaccaggaaaacaatgtatgaataaaatgagactatcaataaagaaatggccaggcgtggtggctcatgcctataatcccagcaccttaggaggctgagttgggtggatcacttgaggtcaggagttcgagaccagcctggccaacgtggggaaacctcatctctactgaaaatataaaaattagctggtcattgtggcaggcacctgtaatcccagctactcaggaggctgagagaggagaatcacttgaacacaagaggcggaggctgcagtgagctgagattgcgctactgcactccagcctgagtgacagagtgagatcctgtctcaaaaaaaaagaaaaagaaaaaaaagtatgaaggccagaagacagtgtgatgacatacttaaattgctgaaagaaaaaaaatcaaccaataattcaacatctttcaaaactctttcaggccaggcgcattggctcacacctgcaatcccagcactttgggaggccaaggcgggaggatgacctgaggtcaggagttcgagaccaacctgaccaacgtggagaaaccccatctctactaaaaatacaaaaactagctgggcatggtggcacacgcctgcaatcccagctactcgagaggctgaggcaggagaatcacttgaacccaggaggcaaaggttgcagtgagccaagatcgcaccactaaactccagcctgagcatcaaagtgagactctgtctcaaaaaaaaaaaaaaaaaaaaaaaagcagagtttggcagaataattttatttttttatttttttttttttgagacagagtttccctctttttgcccaggctgaagtgcaatggtgtgatgtcagctcactgcaacctccgcctcccggattcaagcgattctcctgcctcagcctcacaagtagctgggattacaggcacctgccaccatgcctggataattttttgtacttttagtagagacggggtttcaccatgttggccaggatggtcacgatctcttgacctcgtgatccacccacctcggcctcccaaagtgctgggattacaggaatgagccactgcgcgcggcctagattggcagaataattttttaaaacatgatctatgtctttttttttttttttttttcgagagggagtttcactcttattgcccaggctgcagtgcaatggagcgatctcggttcactgtaacctctgactcctgggttcaagagattctcctgcctcagcctcccgagtacctgggattacaggcacccaccaccatgcccagctaagtttttatatttttagtagaggcggggtttcatcatgttggtcagggtggtctcgaactcctgacctcaggtgatccgcctgcctcggcctcccaaagtgctgggattacaggcatgagccaccacgcccagcctaaacatgatctatgtcttgtctacaagagactcactttagatgcaaagatacaaacagattgaaagtgaaatgatgaaaaagatatttcatgtggccgggatttatatataaatttaaatatatatatataatttaaatatatatataatttaaatatatatttaaatttaatatatattaaatttaatatatattaatttaaatatattatatttatatatatattaaatttaatatatatatttaaattagcgaggcatgatggtgcacacctatggtcccagctactcgggaggctgaagtgagaggactgcttgagcccaggaggacaaggctgcagtgagccatgattgcatcatgcattccaggctaggtaacagagcaaggctctgtctcaaaaaaaaagaaaggaaagaaggaaggaaggaagggagggaaagagagaaagagggaggcagagaaagagagagaaaaagagaaagagagagagagaaagagaaaaaagggaaaggaaggggaggggagggggatggagggggaggggtggagggaggggagggggatggaggggggaggggggagggaggggaggggatggagggggagggggaggggagggagaaaagggaaaggaaggggaggggaggggaggagggaggggaggggaggagggaggggagcggaggagggaggggaggggaggaaaagggagaaaagacaacacaccaaaacttatgagatgcagcaaaaacagcactgaggctgaggcaggagaatcacttgaaccccggaggcagaggctgcagagagccaagatcgcaccactgcactccagcctgggcaacaagagtgaaactccatctgagaaaaaaaaaaaaaagaaagccttccaacaaagaaaagcccacgaccagatggtgaattctaccaaacatttaaagaattaacactaatccttctcaaactcttccaaaaaattgaagagaaggaacacttccaaactcatcctacgaggccagcattatcctgttaccaaagccagatacagacacacacacacaaaaaaaaacccctacagatcaatatccctgatgaatattgatgcaaaaatcctcaacaaaaccgtagcaaaggctgagcgcggtgactcaagcctgtaatcccagcactttgggagccacgtgcaggatgattgcctgaacccaggagttccagaccagactgggcaacacagcaagacccccatctctaaaaataaaataaaggacaggagtgatggctcacgcctgttatctcaaaactttgggaggctgaggcaggcagatcacttgatgtcaggagtttgagaccagcctcaacaacatggtgaaacctcgtctctactaaaaatacaaaacttagccaggcatggtggcacatgcctgtaatccaagctactcaagaggctgaggcaggagaattgcttgaacctgggaggtgggggttgcagtgagccaagatcgcctcactacactccagcctgggaaacagagtgagactctgtctcaaaaaataaattaaaaataaaattacaaaaaaaaaaaggagactttttttttctttggattacaggcgtgtgccaccacacacagctaattttttgtatttttagtagagatggggtttcaccgtgttagccaggatggtctccatctcctgatctcatgatccgcccatctcagcctcccaaagtgctggaattataggcatgagccaccacgtccggcctttctctttttttttttttttattagacagagtctcactcacccaggctggagtgcagtagcatgatcatggcttgccagagcctcaaactcctgggctcatgcaatcctcccacctcagcctcctgagtagctgagaccacacgtgcacattcagaagactacttcaacatagtaaggactgtatatggggaccaggtgcgaaggcttacccctgtaatcccagcactttgggaggctgaggcaggcagatcacctgagatcaggagttcgagactagcctgaccaacatggagaaaccccgtcctactaaaaatacaaaattagctgggcgtggtggcaggcgcctgtaatcccagctactcagaaggctgaggcaggacccaggaggagaggttgcagtgagccgagatcgtgccattgcactccagcctgggcaacaagagcgaaactccgtctcaaaaaagaaagaaaaataaaaagcaaaacagtctttaataaaaacaaagtcaggccgggcatggtgtaatccgcttgtaatcccagcactttgggaggctgaggctggcagatcacctgaggtcaggagctcgagaccagcctgggtaacatggtgaaaccctgtctctattaaaaatacaaaaattttgctgggcacggtggctcacgcctgtaatcccagcattttgggaggccgaggcaggtggatcacgcgttcaagagatcgagaccatcctggccaacatggtgaaaccccatctctactaaaaatacagaaattagctgggcgtggtggtggcgcacacctgtagtcccaaatactcgggaggctgaggcaggagaatcacttgaacccgggaggcggaggttgcaatgagtggagatcatgtcactgcactccagcctggtgacagaacaagactctgtctcacaaaaaaaaaaaaaaaaaaattagctgggtgtgttggtgggcgcctgtaatcccagctactcaggaggctgaggcaggaggatctcctgagcctgggagatcgaggctgcagtgagctgtaatagcaccactgcactccagcctgggtgacaaaacgagacacttttttttcgagaaaaaaaaaagtcttggagaagatgtgaagaaactggaactcccgttaatcggtaggaatgtaaaatggtgtggctactgcagaaaacaggctggtggttcctcaaaaagctaaacatagggccaggcatggtggctcatacctgtaatcccagcactttgggaggacaggcagtggatcacccgaggtcaggagttctagaccagcctggccaacatggtgaaaccccgtctctactaaaaatacaaaaattagccgggcatgatgacaggtgcctgtaatcccagctactcagggggccgaggcaggagaatcgcttgaacccaggaggcagaggttgcagtgagctgagattgtgccatcacactccagcctgggggacaagaacgagacttcgtctcaaaaaaaaaccaaaaagctaaacatagaattatcatatgatccagcaattccactttagatatctacccaaaagaactgaaaacagaaatgcaaacagatatctgtgtgtgcccaggttcatagaggcattgttcacaataacgaatggtggaaactactccacttatccatctacagatgaatgaatgaaccaaacgtggtttatacatatgatagaatattattcagctataagaaggagggaaattctggccaggcgtggtggctcatgcctgtaatcccagcactttgggaggccgagacgggcggaccacaaggtcaggagatcgagaccatcctggctaacacggtgaaactccgtctctactaaaaataaaaaaaaattagctaggcgtggtggcgggcgcctgtagtcccagctactccggagggtgaggcaggagaatggagtgaacacggcaggcagagcttgcagtgaaccgagatcatgccactgcacccagcatgggtgacagagcgagactccgtctcaaaaacgaaaacaaactaagaaggagggaaattctgacatgtgctacaacatggatgaaacttgaagacaatatgctcagtgaaataagccagggccgggcgtagtggctcacgcctgtaatcccagctagtcgggaggctgaggcaggagagtcgcttgaacccaggaggaggaggttgcagagagctgagatcacgacactgcactccagcctgcacagcagattccatctcaaaaagaaaaaaaaaaaaaagttagccaggagcagtggctcacgcctgtaatcccagcactttgggatgctgaggtgggtggatcacctgaggtcgggagttcaagaccagcctgaccaatgtgatgaaaccccatctctactaaaaatacaaaaattagccaggtgtggtggcatgcgcctataatcccagctactctggagggtgagacaggagaatcgcttgaacccgggaggcggaagttgcagtgagccaagatgcaccattgcactccagcctgggcaacaataatgaaactccatctcaaaaaaaaaaaaaaagtttaactcagaaaaaaaaatgatcataaaatttgttattaatctggctaaaccctggcagaagagtcttttaataaacttccatgcgcaaagtttgattccaaagaaatgacactcatcctaagaaaacttcacaatggtaaaatcaacagttcataaaaactgtatgaaaacagcctgatttgtgcatcaaatgtttactgtaaggaacaccccgaaaaatgttcctgataaaaatgaattctatcaaaaaaaaactttggaaacagtttcactgcactgtatagaaaagggatccaggaatttgactggcttaatgcggtgtttgatggaaaagtcttttccaacagaaatgtgttggatttatttttttcccactgcgcttataaaaatggaatcaaagtgtcctgggaatgaaaccattttttgtgtgaaaatggtagtgcaaagagggggtcaaatgttctgttcatttgccttaggcttggttttatcccccagacaccagctgttgagtgtctcctaggcatggtcccagaaaaataactggtcacgacctcttcctagggaggttctggaccccaccttggcctgaacctccgcagaccactctgtctcccacattcctgctagtattctaggaccagagaccccaggacttttcttttctttccctttctttcttttctttccttccttcctttcttgcttgcagagtctcgcgccgtcacccaggcaggagcgcagtggtatgatctctgcttaccgcaacctctgcctcccgggttcaagtgattcccgagcttcagcctcctgagtagctgggattataggcgtgcgccaccacacttggctaatttttgtttttgtttttgttttttttgagacggagcctcgctctgtcgccaggctggagtagagtggagcgatctcagctcattttaacctccgcctccaggttcaagcgattctgctgcctcagcctcccaagtagctgggactacaggcacccgcctccatgcccagctaatttttgtatttttagtagagacggggtttcaccatgttggccaggatggtctggatctcttgacctcgtgatctgcccgcctcggcctcccaaagtgctgggattacaggcgtgagccaccgcgcccggaccctggggaggtttattaacagttccagaacgttggcagatgcaaaatagacaggaagagggagggagaggcagagagagctggacagaggccgggaccatacgtggatgtcagtcactgcttgcaaggccacacagagtctcctactacagagaaggttgagctctcagaccttaggaagtcctgacgtgcccctccctgggtccagccttcccttccccattctgaacttaggacatctagctgggcgaggtggctcatgcctgtaatcccagcactttgggaggctgaagtgggagaacctggcaccaggagtttccgactagcctgagcaacataccaagaccccagcctctaccaaaaaaattagccgggcatggtgtgcacgcacctgtagtcccagctactggggaggttgaggcgggaggatcattggagtccaagagttcgaggctgcattgagctatgttcgcatcactgcactgcaaactgggacacagagcgagaccctgtctctgaaaaataaataaataaaaacacacttatgacgtcaccctctctgctatgacaaggtccttccctgccccaccccctccagggcccatccctacatcttggggaggaaataagtccattttggtcagtcttgcccgctgtcagtaactgtccctacgaattcctctctagcttgaaggattctccacctctcccttctctgttaaaagagtcacgggcccattttcattcattcattcatcaaatgtttataagcagtttccatgctggggacctggaagagacccgacctaggccctgcatcccgactccccgaggatctatcagcctgggaggatggggaatgggagggcctatccctccccacgatcacggcgcgaaccgagctttgatggagaaacacgcggctctgtgagctttagagaacacatttaacctggcctggagtaagacaggggacgggcctgaatcttttatgggacccgcccccaatatcaaccgccccgtccccagcacagaactgggctcctagacgacacggtgccatcacgtccccagtgagtcttcaggatttctggccacgccccttctcagacccaacccccgagcccctcccttgcttgaccccgccccatctctggcctaggccacgccctcctcttagccccacccccatttcattcaacccaggcctcaagccccaccgcccaggacgccaatgctcccaccaatctcacatacccattggtcagagagtgtcactttcccgccctccttcagtagcattggttccctaggtgtcaatcttctttatggcgcccccagcagttgccagggcccaggtttgaggggcagataataatggacgtctcggggcgtctcgttattgggcagaaagcccggctctgggcggggcttagtgccaaacgcttggccgcgtctgcctggtgttcctcagggccgcagcctttcctcacggacacacccccactttccttgctattggtcttatcaggtgttgatcaataggattcctcattccgatacgcaaaactacctgtccttcaccgcttccctcatttcaattcgctctctcctcagaggcggcaaccttctgaacgtagccagggcccgcctcacggaatggccacggaatggtcagacaccccgtcactcctggctggtgggcggggccagggcgcctgggggcggcgaattggcggatggggcctcgggggcggggcagcggctcctgtcagcgggtgaaatggcagcggcggagccggcggcggccgcggtcccggggggcggctgagggggccgggccggggctgcggggcgaacggcgcggctaggatccggcggctcagcccggggcggcgaggctcggcacggagatggcggcgcgctcggcgcaggtagggcggcgcgggccgggcctcccgggcgcctgctcaggccggcggctccgtgatgcggcccgcggggaaccggcaggaccgcaactcgggccgtcgtgccccggaacccgcgctgggagcctcggcatccccagcccgggaccttcggaggaccctggcccctgcccaccctcgttgccgatccctccggacccctccccaggagctcctgcaggatccccctcccccactccgtcccctccccatgaggaccccgcaggcccaggacccccgtccaccctttgcagtgaccctcaggactcctctccgggaaccccctcagggctccccatccccccactccgccgatcagcccctcagaagcgccccccaagcccaagaacccccgtccaccttctgccctgatctctcaggacccctcccttctggacaacacttgccaccccctccccgcaccccctcacttcacgtcctcctatcttgggcccagaactgcccccacctctccccaaggagaccagcctcagggcctacccgccccccatgctgaccccacaggacccctctctggcctctgtaagtcggatttcctacccctgcccacagccctcagctcagcctgctagcccatctcccaccccagctgccacatgcccaagggcacccctaaacaccactccccggcgtccacccagcacactgtggtagctccactgatcctgccccatctggatcctggctcctggatcctgaaaaatccacccatgctcaagacctcccgttggatattctgaaccaccccactccccatccagagccacccatctttctgaaaaccccaaacacacacacacacacacacacacacacacacacacacacacacacagtcacttagatcccccagcacacacagaaaaacttaagagctccaacatagaccccaggcatatctgcccctgcccccacccactcaacacttctgcacccctcctcagatcccacctgtccaggccctcccagagtccccgacagctcccccagctcaagcagagattccagagaccatgaggtgcctgccgcaccccaggaagccaacttgcccctccaccaaaccagcgcccacactggagccttggagggtgacagggccccagaatcccccagcacctacccctgtgggaacctgccccaggcctctgccaagttatccatccttccctgctgtgccctttcaaagggaaggacgctcactttctctcctacactagtgtcccgaaggaaccactgcccgccccctgatttatgccaccccctggcgggaagggagaggattcacagctcctggcttccgtcctgaagtctgcccccagcctcctgaccccatcacgcctactggcctcaaatgccagagccagcagggcggtccaggttgctcctcagagctggcccctgacagcccgagagttctttcacccacaactagtgtgtttggccaaaacaaaacagcttccttctatcttggcatttgagacctgggtcggggcctgccagaagcaggcagctctttgttaaggaatattttcagaagggaaaaatgtgctgaagaggctcgagtggaacatgaatgagttgtctgcttcgttttattccccctcggccgggatgtgattgagctagaggacccgtgtccctgtgtctttccgtcttttgtggctcttcccatccatcccgccgccctccccactcccagctctggcctcagggtccaacctgtaggttcctctgggcttctgtggtcagcggagggtggtttggaagggatcgcaggtggcttggccctggcacagggatgagacaagacaggagaggagatgctggcgcgacactgtggccaggactgcagggggcgaggagccgggccggtccagtcccgcgcagcctgggcactgtgcgtctggggtccttctgacaacataactgtgctcagaaaccctgagataaaaggcccaggcttccttgtggatattcactagcggattgtggaccatccaggaaaaagctcattgcggctcagtacctcaacttccccatcggaaactggggtgcggggagagcggctaaatttttagaacagaacttggaactgcaggaaggctagggtgtggccctgtgtgttcccccagtgccgtgtggaaggggacagcaaggtctcggaggggagtcctatgggctcctgtgaatcactggccacccaggtccctgcgagggtcttagttgacacttcattgaaaagtggccatcttcctagggctgagctgtattgcagggagccagctcgaatcagagctggaagaatggagatgagagatggtctgctgcaggacttgtggttatacacagggtcttcccaggaggaccacggggaacagggtgggcatgaggggctgtcggatagccatgctgaggccccacatagatctctgatgccccacatagacctctgacaccgggtaggaagaggtttgttctgtccacttgctgaaggaaggcgtggaggaaaagactcctgaaggtcacgtggtatctctcacgcacaggaaactaaactctacagcctccccagggtggaattttgtgcagagacagtggggtatgaaggcttcccaggatgactgtgaactctataggaaaccacgaggaggacttgtcagtgatacgaacgcagttttacccgagactgggctcgtggagctgcatctttgtttgagctttgagggggcagacggatgaggaggaatgtatatttcaatttcctcttgcagaatagagatgccagttgttacagggaagccctgggcctggagtcagatgttggggtgtgaaggaatgtaagatgtgtacaatgtggtccctgctctgcgtctaaagtcctctcactggcatgcggcggcccccgccatgtgctcagcaccatgccaagcaccattgacatattatctcatttaatcctccccaaaactcggaggaaccaggattgcagcacgcgcccttgccatcctggcctgaggcctgctgcggggagcatgagacagaattatgtacagcaggctgcaatgggagcccggaaaaaaagcctgatgcatccctggggtgttggggaaggcacagcagggatgacgtatggaccaggtcacaggcaggcgtggcagggaagggtgttccaggcagcagaagtgcttggacacacgcccaagaggcaggagcaagcgtggtgcgctcagggaggcgtgtccctgtacttcctttgataggcgtcttactacaagcccttgtgtccccagtgccatctgtacacttggcacacatggtggggggctccccagcaaaggggatccctagttgggagaacttggaaaggcagcaaagccgcccttcccagggaagactgcagcacacacatgctagcagcccgggcaatagaaggaaggaggtgagtttaggagaactaactcagctcatcagggtcagggagaactaactcaattcatcagggttagggaagagacttacccttttgagggagatttggaaggcctcattggcatgactcacctgcactttcattcatttctcagcatgccacgatatgcttgtgagagtgtttgattgaaatctgaggcccggcacggtggctcacgcctgtaatcccggcactttgggaggccgaggcgggtggatcacctgaggtcaggagttcgagaccagcctggccaacatggtgaaaccccgtctctattaaaaatacaaaaaaattagcagggtatggtggtgcacacctgtagccccagctcacttgaacctgggaggcagagcttgcagtgagccaagaacgcgccactgcatgccagcctgggcaacagagcgagactccatctcaaagaaataaatacaaattttaaaaatttttaaaaaaagaaaaatgagggttttgccagaagggaacctattataatagccaaaagtaatctggtcagatgacaagaaagaaaatttttttttaggtcagaaaggattctgcaggtcagaatggttcacttctcagattttagccaaaggtgtgtgctgctgttgctgctattgttatcaataaagattattctagttttactgtgtttactctttaaacaggatcaccacagaaagggagggcctgttgaagaggggaagtttatttatcccacaaatatgggatgcctactagactctgaagatccaatagtgggctagacagccccagcccctgccctagtagaacttttcatccagaagggaataaatatcacaggtcaggcttgtcctaagcacatgacaggtttaagctcattgattccttccaacaaaaactgtggggtagatactgtcattagccctgttttcagataatgaaactgaggcaggccaggtgcagtggctcacgcctataatcccagcactttgagaggccgagtcagggagataacttgaggccaggagtttgagaccaacctgggcaacatagtgagactctctctctgcaataataataataataataacaaaattagctggacatagtggcaagtgtctgtagtcccagctacttgggaggctgaggcaggagaatcacttgagctcaggagttggagcctgcagttggctatgattgtaccactatactgcagcctgggtgacaaaacaagaccctgtctctaaaaataaaataaaaataaaaataaacaaaaaaaattgaggcaaaatacatcatacccaaggttacaaagatagaaagtggtagaggaggccaggagcggtggctcacacctgtaatcccagtactttgggaggctgaggcgggtgcatcacctgaggtcaggagttcgagaccagcttggttaacacagtgaaaccccgtctctactaaaaatacaaaaattagcgaggtataatggcgggcatctgtaatcccagctactcaggaggctgaggcaggagaattgcttgaacccaggaggcaaaggctgcagtgagccaagatcgtgccactgcactccagcctgggtgacagaggtagactcggtttcaaagaaaaaagaataaaaagaaaagaaagaggtagaggaaggatttgaacccaggctgcaagctctgaagttctcacctggagccaagagatctgggataacaacctacattccaaggccagggatatggaaacttccagaaccatgtggaggagcagctagactgggcgcaagaagagatcaggcagggacctctgaattcaagccgctgttcttgttatccaaggggcagctcacctgtcagttgtccgcccacaccttgccaaggacgagaggacctaaggtgctaggttgggccatttccccagaggtcagagccagccaagacagcagcagtctgtcaggctagacaaatcggggtcacatggcatcttgggctttagattccgaaatgagtctgtgtccctggtaatcattagacatggaggaatcagaaatggggggtagggccgggcgtggtggctcacacctgtgatctcggtactttgggaggccgaggcgggaggatcacctgaggttaggagttcaagaccaacctggccaacatggcgataccctgtctctactaaaaatacaaaaattagccagatatggtggcacgcacctgtaatcccagctactcgggaggctgagggaggagaagtgcttgaacccaggaggcggaggttgcagtgagccaagatcgtgcaactgcactccagcctgggctacagagcaagactctgtctcagaaaagaaaaaaagaaggaaatggggggtaggggagtaagggaaacaacatggaaaggaaactcggggtcttcattgctgtctctgaaaatgccacagactgaaagatgcatcatatgtgctcgccctctctcaccgttgaaaaataatgactgttttcactgagtaacccctgcacttggggtttcacatacgtgtatcattcccaaagtaaaagaatacagacagagctgcagcacagcgggtggatttagggcaaaggctatacagtcagaaatccaagttcaaatccttcttcctcctcagcctagtcaagggactctctgtgccatatggcacttgtgtgttaaagccgtcgttggcttttctgcttacactgtacagaaatttctatttttatttttttcatttttttttttagacggagtctctcactctgtcatccaggctggagtgcagtggcgtaatttcagctcaccgcaacctctgcctcctgggttcagcctcaggagtagctgggattatagccatgcgccactacacctagctaattttgtatgtgtgtgtgtatttttaatagagacagggtttcaccatgttggccaggctggtctcgaactcctgacctcaagtgatctgccccccctcagcctcccacagtgctgggattacagacatgagccaccgcacccagcctttattattatttttaaaatagacttgggctgaggcaggaggatcccctgtggccaggagttcaagaccagcctgggcagcagagtgagacccctgtctcaaaaataaaataaaatggccagttgtggtggctcacgcctgtaatcccagcactttgggaggctgaggcgggcggatcacctgaggtcaggagttcaaaaccagcctggccaacatggtgaaaccccatctctactaaaaatacagaaattagccgggcgtggtggtgcgcacctgtaatcccagctacttgggaggctgaggcaggagaatcacttgaacctgggaggtggaggttgcagtgagccgagatcacaccactgcactccagcctgggcaacaggagtgaaactccttctcaaaaaataaaaaataaataaaataaaataagactattttgtagaacactttgagatttatggaacaattgagaagacgatacagagtttccatatgccccatacccagtctcctctatagttaatgtcttccattcatatgatacatttgttgtagttaatgggccagtattgatatattattattaactaaagtccacctttcattcagatttcctttgttttttcccagtaaccttcttccatcccaggatcccacatgacatttagtcgtcatgtctccctaacctcctctgggctgtgacagtttctcagactttccttgcttttcgtgaccttgacgtttttgtttgtttggtttggtttggtttttgttttttgttttttgagatggagtttcgctcttgttgcccagggtggagtgcaattgtggtgcagtctcggctcaccacaacctctgcctcctgggttcaagcgattctcctgcctcagcctcccaagtagctgggattgcaggcatgtgccaccacgcccggctaattttgtatttttagtagagacagggtttctccatgttggttaggctggtctcgaacccctgacctcaggcgatctgcctgcctcagcctcccgaagtgctgggattacaggtgtgagcccccatgcccggccaaccttgacggttttgaggaaggtggagtaggtgttgtgtagaatgtcctctaatactgatctgtctggtgtgtttattttttttttggttggtttttttttgttttgttttgttttgttttttgagacggagtctcgctctgtcacccaggctggagtgcagtcgtgcaatctcggctcactgcaacttccgcctcctgggttcatgccattcccctgcctcagcctcctgagtagctcagattacaggcatgtgccaccacgcccagcaaatttttttgtatctttagtagagacagggtttcatcatgttggccaggctggtctcaaactcctgacctcaagtgatccgccggccttggcctcccaaagtgctgggattacaggtgtcagccaccatgcccagccactctggtgtttctcatggttagactggggtcttggggaggaagaccacaggggtgaagggtcctttctgtcacatcctatcaagggtacgtgttagccacgtaacttatcactgttgatgttgaccttgatcacctgcctaagcgacatggaaagtttcatcttcatttattcaacaaacgtttgtcgagcatgtactgaatgccagatagtgcattaggggcttggaatagagaattaagaagagaggctcttgtcctcaaatcgtgcatgaccctagggcaggcaggcaggcaggtttagaaataattgccatagaatgtgcattgggcttgggtgtaggcagaggggtggatgttttcagggagagagagggggaaaagcgagccaggatgctggaagaagggaggttgacagagaagttttcacagaaagaatggccaaaccggccaggcacagtcccagcactttgaggagccgaggcgggaagattacttgaacccaggaggtcaagtctgcagtgaacagtgagctatgatcataccagtgcactccagcctgggagacagagcaaaaccctgtctctaaaaagaaaaaaaaaaaaatccttggccaggcacggtggctcacgcctgtaatctcagaactttgggaggccaatgcgggcagatcacaaggtcaggagatcaagaccatcctgggtaacacagtgaaaccccatctctactaaaaaatacaaaaaattagccaggcgtggcggtgggtgcctgtagtcccagctactcaggaggctgaggcaggagaatggcgtgaacccaggaggcggagcttgcagtgagccgagatcgcgccactgcactccagcctgggcgacagagcaagactccatccatctaaaaaaaaaaaatccaaaccgggtcttggagaatgcccttccagtcagagggaacagagtatgcacagacactggcagacatcaggagacccatgtgcctggaggactgagtgtgccaagcagggatgcagaaagaggcgaggctgggaagggcatgcacgtcttgcaaagacatctgggctccatctcaccattgggagctgctaaagggtcttaggcaggcaatgacgtggcaagagctgcagttctgtatggttctggtggccccatggacagagcatcagaaaggacagaaagttcaatggacgtggcaggcgccatcaagacagcagctttggtggggcacggtggctcacacctgtgatcccagcactctgggaggctgaggcaggagcatcacttgaagccaggagttcaagagcagcctgggcaacatagtgagaccccaagtctccaaaattagaaaaattggcaaggcatggtggcgaatatctgtggtcccagatactcaggaggctgaggtgggaggatcacttgaggccaggatctcgcaccactgcactccagcctgggaaacagagcaagaccttgtctctaaaagcaacaacaacaacaaaaagacagcagcttccagcctggagagcagaggccagttgggagtgaggtgtgggatgtgggtggtagacttggctgagctctagaacatgagaagggaggaggggaacacccaggcctggccagagtgggtgggtggaggtggcaggtggcaccggggacccagatagatgcacccgcagtaggacaaggggcctgcttctgtcaggaaagcattgaatttgaagagcatctccgcatgaggggccagaagggtctttctaaaatgcaaacctaggccacgggcagtggctcacgcctgtaatcccagcactttgagagacccagacgagtgaatcacttgaggtcaggagttcaagacgagcctggccaacatggcgaaaccctgtctctactaaaaatacaaaattagccaggcatggcggcacatgcctataatcccagctactcgggaggctgaggcaggagaattgcttgaacccgggaggtggaggttgctgtgagccaagatcatgccattgcactccagcctgggcaacaagagcaaaactccatctcaaaaaaaaagaatcaccccaattaaagcttacagtttggtggcatttattccaactgtgttgtgcaaccatcaccactatctaattctggaacatttctatcaccccaaaaagaaacctacacccataagcagtttctccccattcctccctccccctggcccctggtgaccacaaatccactttctgtctctatggattgcctattctggacattccgtataaagggagtcacacagtgtgtggcctttggtgtctggcatctctcactgagcaccttgttttcaaggttcatccatgctgtggcctgtctcggtgcttcactccttttcatggctaagtaatattccactgtctgggtggaccatgttttgttgatccattcacccgttgatggacatgtggattgtttctgctttttggctgttgtgaacaatgctgctgtgaacagatgtttgccgttctcttgcgttgagccctacgagtggatttgccaggtggcgtggtgacagtgtgtttaagtctttgaggaaccgcctgactgttctccatcctaccgtattgtttactgcaagcatttatctcaatctgtgaaggagggtctgggtgattgtttcttggtctctgccccggacactccaagagggcacaggtgattcctgcctctgcgggggaaacacagaacatggaatggtgggtgggctgggggctgatggagctgttctggcaacttgggcaactttggccagttcttgagagaaacgaaaagctggtgacatacatttggtcatttaagccccaagaatgagatccccaagggcatcaagatcaaggccaaggagggacccagggaggaagagatgccacgtgggagaatgagaagtcccggccagagaggcaggaaggaagccaggagcccagtcctcatcagccaggtgggagggggcttagggaaggaggaagcatgcgcggcagtgcccccgagagggaaagccaaacggaagtcgaagatgaccagcattccagcactttccgtccccacgccccccacaacccccaaacacagcccctttccagtgctctggcctggctcagcttcctaagctgtaggtggccctgtggaggtgtggcttgagtgggtgctggcaggggcagggtccaggaccccccttcagatggctgaggagcagttgagggtgaagcattgaaattaaggacacggagaggctgggaccccagacccagaggccagtgggtgggttgccaaggcctgtgcccatccagcatagggagatggagatggggcctcccctgcctcgctccctaccatgtctcctgcctagacagtggccggccctcaggtggccctcagtcagcaccaggaaggagtgattgagccagtgagggtcatggcacagtgggaggggtgcagggtcgcccacagaatcaggacagcagcccacctccaccccaaacctgctctgttcccagggggtgagcgctgctcggtgcaggaagtgtgtgagcgcgtgtgtgtagatgggtgggaatgaatgtgtgtgtgcctgagtgcgggtgcaagagtgtgtgtcaatgggtatgttttgtgttgagaagtgtgaaagagtatgtgtgtatgcctgagtgtgtgaatgtatgtcatgtgcatgtgtatgaggtgtgtactgtgtgtgtgaatgtgcatgggtgtgtgtgttgtgtgtgcatgtatatgtgtgtgtgtgaatatgcataggtgtgtgtgcatcaagtgtgtgcatgtgtacatgtgtatgaatgtgcatgggtatgtatccagtgtgtgcgtgtgtgagaatgtatgaatgtatgtatcaagtgtgtgcatgtgtgtgtgaatgtgtatcaagtgcgtgcatgtgtgtgcatgtctgtgagaatgtgagtgtgtgtgtatcaagtgtgtgcatgtgtgtgcatgtctgtgagaatgtgtgaatgtgtgtgtatcaagtgtgtgcatgtgtgtggggatgtgtgaaagtgtgtgtatcaagtgtgtgcatgtctgtgaattggggtgtatcaagtgtgtgtatgtgtgtgaattgtgtgtgtgcatgtatcaagcatgtgtgaatgtgcatgggtgtgtatcaagtgtgtgcgtgtgtgaaaatatgtgaatgtgggtgtttatgtatcaagtgtgtgcatggatgtgtgtgcaaattgtgtatcaagtgtgtggatgtgcacgagtatgtgtgtattgtgtgcatgtgtgtgaaggtactgggtgtgtgtgtatatgagtgtgcgtgcacaaatatgcataagcatgtgtatatcgagtgtgcacatgtgtgtgtgaaggtatataggtgtgtgtatctgagtgtgtccatgtgtatgtgtgaatgtgcatgggtatgtgtgtattgagtgtgtgcatgtgtgtgtgaaggtaccgggtgtgcgtgtatccgaatgtgtgcatatgtgtaaacgtgtgactatggatgagcacgtgtgttgagtgtgtgcatgtgtgtataggtgtgtgagcgtgtgtgtgagagaataggcatggctgtgtgtcgagtatgtgcatgtgtgtgtataggtgtgtgagtgtgtgagaataggcatgggtgtgtgtgtcatgtgcatgtgtgtgtataggtgtgtgagcgaataggcatgggtgtgtgtgttgagtatgtgcatgtgtgtgtataggggtgtgtgtgtgagaataagcatgggtgtgtgtcgagtgtgtgcatgtgtgtataggtgtgtgtgagaataggcatgggtgtgtgtgtcatgtgtgcatgtgtgtgagagaataggcatgggtgtgttgagtgtgcatgtgtgtgtataggtgtgtgagtgtgagaataggcatgggtgtgtcgagtgtgtgcataggtgtgtgagtgtgagaataggcatgggtgtgtcgagagtgtgtgtgtatgggtgtgtgagtgtgtgtgagaataggcatgggtgtgtcaagtgtgcatgtgtataggtgtatgagtgtgtgtgagaataggcatgggtgtgtcgagtgtgtgcatgtgtgtataggtatgtgagtgtgagaataggcatgggtgtgtgtcaagtgtgtgtgtataggtgtgtgtgaataggcatgagggtgtgtgtcgagtgtgtgcatgtgtgtgtataggtgtatgagtgtgtgtgtgtgagaataggcatgggtgtgtgtatccaagtgtttgcatgtgtatgtgtgagagtttgtatgtgagtgggggtgggtgtgaatgtgtgtacatgcgtgagggagtggggtggctgtgaagagtgtgagagtgcatgtgtgttgtgcgtgcacacacgcttcaggaggatggtttccactgagagagtctggggatgagtggagagaaagttccggtgggatcagaaggttcctgcctctcagactgcaagtttcagccctgtgtatttaatacatttcacttcctgtatgaaatacacacacattcgtgataaatagctgaacaacctctgctggtggacggctcccgggtttgggggatttttaaaatcagaaactgaggctcggctgggcgcggtggctcacatctgtaatcccagcactttgggaggccgaggcagatggattccgaggtcaggagttcgagaccagcctgaccaacatggtgaaaccccgtctctactaaaaatacaaaaattagctgggcgtggtggcacgcacctgtaatcaagcaggagaatcgcgtgaacccgggaggtagaggttgcagtgagccaagattacgccattgcactccagcctgggcaacagagcgagactccgtctcaaaaaaaaaaaaaaaaaaagaaagaaagaaaagaaaccgaggctcgggcagagattgggtggggctgatgccctgagcttgggtttctttggttctgaagctctcactgctccccaactccatctgtggttctgaggctccagcctcacctccaccacctcctccccattctcccagctctgaagctaccctcccagcccctccctgcccagagaggtccttctgatcagcacttcttgtccacagcccccgtctctgtccgggcagactttgactctgtgggaggccccaaagtggcccccactgtccctgcctcgggaatgattaactcctgattaggtggtgcccagcagcttggtctttagggcaggtggccctggcccacttggcaatgagagttccttccactccccaaaatccaaaaccctcagcacccggcagactaggggaacgcttgagggcccaaggtagaaccagtagccttggggagccacagaggcctggagaaagagggttctgggtccccatacagtgaaaaaagaatggcgcacctcccccaaccctattccaggaggactggggtggccagggtcaagtccatccaacctgtaggccctcaggggttggttgggggctgagtttgggctgtgggaaggtgcccagtgacccaacggtagtcaggcaggtatagagtggtctgctatggtcccgccaatgtccccctgctgcctggggatccagatatccccactccaaggacccagcgaggccctctctgtaggtggagctgtcagccaggtcaggtggggtcaagtggcacacggcagactcctgctacagagcgtgccgggcagtgggcgggcatgaggagccgtgcaaataaggaggcaggaggcagggtttccttcctgccatcaggaccctaggtatccccatcttctcagacgctggaggtgagcctgggctcaccaggaagaagcatgaaggaacaccatccccagccgctgcctccactcccatagccgtccctttcctctagggccccctgctaggggtcccctggccatcagtccccacacaggccacagcagaacccaggagccctggctccaggatggacagtgatagccgatgtccgtggggccatcactgagtgtcaggctctgttctgaccaggttatgtgcagtcatgtgctcagtttccacagccacccttgaggctaggtcctgtatgatctcagtgtacggaggctcagagacaccaagtgactggcccaaggtcacacagctggttgaggggagccatgcttcagacgcagatccatttgagcccagtacctttgtttttgacatggcattgatctgcctccaccagggtggcagaaggcgagaggccagtgtccttgaagcccccagaagggtcgggccagatgacacggcaaaaagataggagagatgtgcctgggactcacctggcacgtggcaggccaagatctggatacggatcggagcccacagctctggctctgtgtctgccagggcacagattcccagcactctgccacgtccctggcttctcaacccaaggggagtcgactcttctggccattggcagcgccagacaattaacagtcgaaagtaattgctcttggccgtgccagcagcccactttggttgatgagatggggaagtcagacactgatatggggctcccagggcaggccgtggcggggacggggacaaagctattaggaagggccagaaaagcagggggctcctgcaccccgaggtcccagcagggtccatggagccccgagtgacagggagcctctgctccgggccctgctccagcctcaggggtgtcgagttgagccttggccttcatgcccagggacagcaggacggctcacatcctggcaacagtcctcccatctccatccagacatccggcctgatgacacaggcagggatcccaatcgccagggtctcgaacagaaggggcagcatggctgtcagctgggctggggcgcatggggatgaggggtgcacggacgggggtggaccagaggcaggaagcccagggtgaggaaatgtcccgagggtgggcaggcaggatggagtgggctcccacccaatgccgaccacgcatgtctctggcccccagacagagctgtgaaccaaccccgctcacggctaacaagcccacccaccatggcgagccccactctgagccccgactcctcatcccaggaggccctgtcggcccccacctgctccccaacctctgactccgagaacctcagccccgatgagctggagctgctggccaagctcgaagagcagaaccggtgagttgggggctgggggatggggtgaaatcttggggtgcagtctgggcccccacaggagttcccaggtgccctcacattcagagccaggcccagtgtgtgcaatgtgacagccacctccagatgctggatgagggacagacacctcctttcatcctcccaaccctggctgaatatatgtgtccccaccctgttcagatgagactgaaggtttgagaggtcaagtgaatctgtgaatccgccgcggttaatggagccaggactggaggaagagtcgattcgggccttcctgctttcttcctctgaccctacccccatttaaaatgcaggttttaggctggacgtggtggctcacaccaccgaacactttgggaggccgaggcagacggatcacttgaggtcaggtgtttgagaccagcctggccaacatggtgaaatcctgtctctactaaaaacacaaaaattagctgggcatggtggtgggtgcctgtaatctcagctacttgggagcctgaggcaggagaatcacttgaacccgggaggcggacgctgcagtgagccaagatcacgccactgcactccagtctgggcaacaagagcaaaactccgtctcaaaaaaaagggggcgctgagggcagtggctcaagcctgtaatcccagcagtttaggaggctgaggcaggtggatcacctgaggtcaggagttcgagaccagcccgaccaacatggtgaaaccccatatttactacaaatataaagttagccaggtgtggtggcatgcacctgtaatcccagctactcaggaggctgaagcaggagaattgcttgaaccaggaggcagaggttgcagtgagctgagatcacaccactgcactccagcctgggcgacagagcaagactccatctcaaagaagaagaaaaaaaaaagaacaagagggacctaatccctggtgtcctctaagacccccaggagggggaggatgggctgggctcgccaaggatccctgtccccagggagtcactggttcccctctgtcggcccttcctgcccaggctcctggaggccgactccaagtccatgcgctccatgaatggctcgcggcggaacagtggctcctcgctagtgtccagctcctcggcctcctccaacctgagccacctggaggaggacacgtggatcctgtggggccggatcgccaacgagtgggaggagtggcggcgcaggaaggagaagctgctcaaggtggggggcggccaggcaggcagggctgggccgacggcgtgggcaggtggtgcggtcactcagccaccaggcagcgccagggtctgcggggccccagcctgggcacagcggcagcagtggagatgtgcaggcactttcagggtgtcctgccagagcacagggacaggagagagtgagtcagggtggtgctggacaggccctgcaccctcgagtgcccatgtgcttgctgccctgtagtgcccatgaaggatgggggtgtggtggctcacgcctggaatctcagcactttgggcggccaaggtgggaggatcgcttgaggccaggagttcgaggccagcctgggcaacgtaatgagactccgactctataaaaagtttaaaaattagccaggtaggccgggcgcagtggctcacgcctgtaatcccagttcgttggaaggtcgaggcaggcagatcacctaaggtcaggagttcaagaccagcctggccaacatggcgaaactccgactctactaaaaatacaaaaattagctgggcgtggtggcgtgcacctgtaatcccagctacttgggaggctgaggcaggagaatcacttgaacctgggaggcaagaggtagcagtgagccaagatcacgccactgcactccggcgtgggcaacagagtgagactccatctcaaaaaaaaaaaaagtttaaaaattagccaggcgtggtggtgcacaactgtagtcccagctactcaggaagctgaggcaggaggatcgcttgagcccaggagttcaaggctgcagggagctatgatcgcaccactgcactccagcctgggtgacagagggagaccctgtctctgaaaaaagggggtaaaaaaaggattggggaccatgagttctgtgccatgcttgaggcctggatgagccacgcctgaggagctgggctgggtggccacggggaggctgcgctgggaccgagtccagcccccgcttcccgctcccgtggccaggagctgatccgcaagggcatcccccaccacttccgggccatcgtgtggcagcttctgtgcagcgccacggacatgcccgtcaagaaccagtactccgagctgctcaagatgtcctcgccgtgcgagaagctgatccgcagggacatcgcccgcacctacccggaacatgagttcttcaagggccaggacagcctgggccaggaggtcctcttcaacgtcatgaaggtgaggcccagggctccccgctccctcggtcccaaaggaaggagaagttccccagttcaccggctgtgctggacggcgggaccctgctctcaggacttgttcccttctaggcatactcgctggtagaccgggaggtgggctactgccagggaagcgccttcatcgtgggcctgctcctcatgcaggtaggtggctggggggtggctgggctcctgccagacaacagcccaccctgggctcggcccccaagagatggacagaagtggcgtgtcctccacccagcgtcttgctaggggtagatcctccttctccatccacacccgtgacctctgccaatcgccaggccaaggcccagtgagtggcacctgtctggttgggtcctgtctgctgtaccatccaggacagagaccgggtttggagggataggctgtctctctctgccacatctcagggttggacaggaacctcaggctggggacttaagccatccagcgtggtgtttatggggcttgggggtctcctccagagaaatcgggaggctgacagggagagaggacgcagctgggacaggaggtatcctaaccagggggatgctggcagtggccagccctgggttcaggtccagctcccctgtttcctgccgagtggcccttggcaggtgacctcagcctcaggtcttccatcagtaaaacagcttgtgaggacacagggaccaacagtgtgtcatgagagtctagggagccaggtaccgacatggacatgggcccctgtaccccagggccctgatgagcagcgagatgcccctccccgctgcgctgccctgagcccccccacctgcccgtcccccctagatgcctgaggaggaggccttctgtgtgttcgtgcggctgatgcaggagtaccggctgcgggagctcttcaaacccagcatggccgagctcgggctctgcatctatcagttcgagtacatgctgcaggtgagcagggccgcaggagagcagggctgcaggagggcagggccacaggtgggcagggccgcaagggagcaggatcgcagaagggcagggctggcaccctagaccatacccgggcacctcttggactgaaaattccaagcctgtgaaatcacacctggacgttccaactccaaaaggcactcctctttccatgcagcactgccctgaaggatgcttggaggaacaggagagccaccactgaaggggggctcccagggctgctgaggcagaggggtggggcaggctcacatcggacacagccacagccacctccctgtctgctccagagtgtggtggaaggagggagtgttgtctgcctgcctgattactggagagccgcagacgtctgtttataaatagcagcccccgcagggcctgctcccggctggcaggcagagccgccaaggccgtttgcgaacatacacacacccgcatgcatacacacacacgcagacacacacacacacaccggcccgcctcagctgccatggcaggtggggctgtgcagtcatccctggatgtgacagccccactccctgggcctggatcatggacggtgctgtagccttagggggcctggtagtgccacaagcaggaggcctgggctgcagagaaggcaccaccccacctcaggctgggtagcagagccctcccacagccaagcttgcaaactcagggcgcagagagcccctggcgctgggaggaagcccgggatcctaacgccttctccggcctcagtttccccagccgtctgccactttctggctgtctagagttcaggccaatccaacacagcttgcacaaagctttatgctggggtccaagggaggtacagtggctggcaggtcacgtaacaaggtggggggggggctccccccagggccagaggctgccacttgcccatgctccacctctgggtctcagggtgtctgtggggagtgacccaactcccccagcctcagacacaccctctcaggctgtcgtgaggaccccatgagctgccacgggcgcatcacctacccagggtgggcccccaacacaggcggctacagatcttgccatccctgcctgtcccccaccccgtgctactcaaagctcgggggtgcttcggcctccctcagacagagtgctgagggagcaccaggaagggagcctcaggctgcccagcgcaggtccaggaaggctccctggaggcggggacactgaggcccagcaccccccggtgggagggcgtccccctcactgtgcccacccggcctcccacccctgcaggagcagctcccagacctcaacacccacttccgttcccaaagcttccacacatccatgtatgcctcgtcctggttcctcacactgttcctgaccaccttcccactccccgtcgccacccgggtctttgacatcttcatgtatgaggtgaggaccgatggtgcctggggagggaagagagccccttgggggtggttggaacaggagcctccctgccctccacctcccactgcctttgccgcctttgcaggggctggagatcgtgttccgagtgggcctcgccctgctgcaggtgaaccaggcagagctgatgcagctggacatggaggggatgtcccaggtgggccgggagggccagggccggtggggctgcccccaatcaggggcttcgagtcacaggatgccctcacaagtgacagagagggcccggcttcgagggtggaaggtggtgtgcctgacatccctgatctgttcccatccactctgttcccctgaggtctccctaagggaccagaggaccccctaggctctgccagacacagtcaggggccagcagcctggccgcagggagacaggaggcccaggctgagccctgggagccccactgcccacctcctgcccccaaccccgcagatgccccaaagcctgatggcagatcatgactgactgaccatgagggcatccccaccctgccgcccagcctggtgagggcacaggagggagtttgggggtctaggcaacctcacgccttgccccgccccagcccggcctgcctggaggccctgctgctggccagcctgcctcccaccgctacttctctgctgtgcgggcccctgccccctccccgcgtcctccagctggtgcttcagggaagaatgcacaaaggccacggttgtgtccgtgaacatgggcaggcattgtccacagctaccagagggggccagctgggccgggtgcaggagctgtgtcccccctgggcttaccttaaccctttgcacaggcccgaggcccccggcatacccatcctccttcccccacgaaggtcccctctgtcagaccccccgaccctcagccttcactcccaggagagcctccttggcctgcttttctttttttcttttacctttttctttttttttttaagtcggagttgctctgtggcccaggctggagtacagtggtgcagtcctagctcactgcagcctccacctcctgggctgaagcgatcctcccgcctcagcctcctgagtagctggaaccagaggtgtacatcaccatgtccagctaatttttttttttcagaaatggggtctcactatgttgcccacactggtctcaaactcctgggctcaagctatttatttctcccacctcaggcttttaaatcattgggattatatgaatgagccaccacatccagcatctgccagcttttcttctggaaactaaggctttggctgcaggcagtcccccattccctcccctcacgctcagtctttccattgctccacaaacactgaggacacggcgttgaggacatggcgacaccccgggcagacccgttcctgcccccctccagggcaacagggctcgggcggcccccggtggtcagggcctgcatgttggtgaccaggtgaccggctgtgtccccacagtacttccagagagtgatcccccaccagttcgacagctgcccggacaagctggtcctcaaagcctaccaggtcaagtacaaccccaagaagatgaagaggtcggtgcctgctgggcaaccagggtactggtaagaaggggggacccccgagggcatgacagtaaccacggggccctcccgatctgcaggctggagaaggagtacgcagccatgaagagcaaggagatggaggagcagatcgagatcaaagtgagtccaggggcccaggggcggggacagggatgggaggcctttgggggctgccctccgtactctaaagatcggccgctagggggcgggccttcccagcgcacaggcggacccggcggtccttggcggacaggcctccgcccacctgcgccgtccttcacctgttaggccagctgtgagcgcctcccccgcctgacgccgcggtaaccaagacagtcaaggtccctgccccgctgggccgcccagcgtcatggggaagcaatcaataaaccactgaactagagtgcggactctaaatgctctggacaaggatgtgcacgcggtgggcaaggctgacttgggcagaggctccgggcccagggtgtcgagggctaaaggcccagggcagcagcgtgccttgggggctggaggaattccaagaaggttgcagtggaggaccccgcaaggggaccgccctctggggaaagatggagcacgcagggcccagacaccagggtgtgtagggcagggtgtgggcactcacccggggcccctggttcctggggcaactggcccaccagccctgccaggtcagggggtttcctgagtgtgcaaagcttctctctccttccttgcgcattcttccctttacacgtgattttagttatttactcaacaagcatttattgccgggcgcgatggctcatgcatgtaatcccagcactttgggaggcggaggcaggtggatcacttgaggtcaggagttcgagaccagcctggctaatgcagtgaaaccccgtctctattaaaaatacaaaaattagctgggtgtggtagcacacacctgtaatcctggctactcgggaggctgaggcaggaaaatcacttgaacccgggaggcggaggttacagtgaggcaagattgtaccgttgcactccagcctgggcgacagagtgagactgtgtctcaaaaaaaaaaaaaaaagaaaagaaaagaaaaaaaacatttattgagcacctgctgtgtgccaaagtcacagctgagactgagggcgcaccagtgataggaagggacacagacacaaacccaacacagcctggctccatgctcttcaggggcagagccgcacagtggctaacactggagtccaacagacaaggattcaattccagctccagcggcacagtggctcacacctgtaatcccaacactttgagaggctgaggtgggagggtggcttgaggccaggagttggagaccagtctgggcaacatagcaataccccgtctttacaaaaatatagaaataaatacaaaaggtgtgcccagctcctgcaaggatggctgtgcttggtgctgtgatgggttgaagccagagagatgatagggaaacccaggggccagggatcagggctccagattgctatgaggaccagagacctgaaatagctctgacccagctgaactgagggactagggcaatgccctgccccactctgactcagtttccccacatgacatgcatcaatgactgtcaagtctgcggttctgtctgactgcatttgcttcctgggaatgttctaggtgtttccatcaccttttctccccagaagaaacccaggaaatattctgtgtgacctgcagtgtggcagggccctcactcacctgccaatccaaacaatttctgtaccaccttagtatcaagcaagggggcacaggtacagtcgagattcaactcgtttgcaaacctcacctgctccccagagtgtcctgggggaacctaaagtgcaaatatctttttctttttttttttttttttttggagatggagtcttgctctgtcacccaggctgcagtgcagtgaggtgatctcggcttactgcaacccctgctcccgggttcaagtgattctcctgcctcagcctcccctgtagctgggattacaggcatgcaccaccacgcctggctaatctttgtgtttttagtagaggctggtctcgaactcctgacctcaggtgatttgcctgcctcggcctcccaaagtgctgggattacaggcgtgagccactacacctggcctaaaaccgcaaatatctagccaaaatccatcagcacagaatggaaggcaggagcaagggagacgtcttcgaaaccccagccagggaacagagaaaaccactggggacaggttgctctcagcaggtcatgggaatgtagttgtcgagaaaggatgcatgatcagcacgctggacccagactcaaagaggagcctgcccccggaattgaacccgggtgcttggggcaaagcagcgaggggtgggtggtggctgctcgacagctgcttcccccactgattcccgcacaacccttggcagactgacccacgtgtgggaaggagtcttctgagggggcgtgggtactgactggcccccaaacacacacacagccacgaaggcactgacgttatttttactgaacccaggtttgttttaaaactttatttttttgtaatcaagccagtctgaacaggaattggccctgttttctgaaatcgctgacccagaacgtaagatgctggctgtgccctgcccggaaaagtggcctggccctaaggggactgaccccggcagtgggtaaatgaggggtgcatgtagacaggcgtggggggcgggctatgacgtgatctccccccacccccatagagacttcggacggagaaccggctcctgaaacagcggattgaaaccctagagaaggtgaggggcgtggccactgtgaggacatggtcgccatggggtgtgacccaccatgcggggcatggccgctaacctggggtggactcctccaagtcttctcctctctggaggactaagcagccctaccttcctgccccaggacccgacctgaacccgatttggagtgccctgcaactgggggcgactcgtatggtgattaatcctggagtgggggcgagttacaacccagtggcctgcagccacgggaatccatttgtgttctgtgccctccccggctgcacagacggggaggggtgaggaggagggagaactgccactttgatggacgagccccgtaattgggccacaagccaccccaccctgtaatttggaagtcttgccctcaaaagaaaggaaaggaaacccagtggaggagaagcgtggcgccatggtggggagccacagcccggactctgctccccaacatgctaaagatgggggtggaattgggggctcactgagccccagccccgggagcccccaattcctgctcctcactcgtcctcacttgaccctccactggccacaggaagtgggttggcagccggatttggttgccctcaccccaaagccttgttctgccttaaaattacaacgcaccccctcctctcccactctccaggaggtccgcacgaagccaaaagtccccctgccccccacagtttttccagccagcagcggcccggctgaccctggagggtgggacagtgggtttcccagccctgcggcctcccccacagccgcgggcacccccgacctccccgctcacaccgaacccctctccaggacggagctggctctagctttggtcttcctccgggtcctctcctgctggttctctggtcttccctcctctctcccccgcttctagagatagtccactgcgttagtgacaagtggttcttgtctgtctcccctctcctgtccccgcgccttccgctctgcctcctccccctgtcgctgggaacccccttcgccgggtaggagagcgctgctctggctgataggttaatccaggtactgtagctttttatcccctctccggattccttcctggccccttccctgcaccctgcacatgacagccagtaaccgcctcttccctgccattctgcgggcaggcctggcgccatgcatggagcagctggggaccgcttctgggggacacagaggcttcccgggggggcggggcatgtgaagtggggagaagggtgtgtgtggaggggctgtgagtgcgtttgggtgtgaatgtccacatgcatgtacagaaagcttcctccgggcgacacagggtggggacccaggagggctggggaacctaaaaccatattcacataaggccctggtgtgtgcagtgctgcggtcacacacacacacaacacatgcacacacacacacgcacacacacgcccggccctcacgctgctgctctctgctcctacctgcaatgcctgctaccaccttctctagctcacctgctcctgctgccacctcatcttgaatggctttatctggaagctgccacccgccacctggtggctttgagcctggaatggggggcccaagttgggtaggggacaaagatgaggtgggggaaaaaagggggtcttagctccaggcaggtggaggccccagagcccaggactagagaagatgccgctgggagaggtgaatgccctggggagcccagccctctcctgccggggcctcagctgtccccagatcctcaccctcaccggcagagtctggcatgaataggcacaggtggcctcgctgtgcccctggataaggatcccaactggggcagagactgagagccagagtggggaaggagatggagctttccaagcccagggctagctctgttcctcccgggctcctccaggtgtcctattcctgcctgtcacccacccacgtccccaggcccagtgggacgctcatcccaggctctgagtacgggaggcccccacctcacttccccccacctccactctctgggcctccccctgtggcgggaggcagggccttgggtgggagccgagggtcacggcctccccctgccccctgtcctcgctgttctcaggggcaagtgacacgggcgcaggaggcggaggagaactacgtcatcaagcgggagctggcggtggtgcggcagcagtgcagctcggcggccgaggacctgcagaaggcacagagcaccatccggcagctacaggagcagcaggtaggggcgggtgtgcggggctgctgggcggggccatgacccgcgcccccgcccccgcccaacggttttctttcagggctcataatctgccccgcctcagcacctggccctcctgttcctttctggggtaaggggaacccagagacaagcgcagattctcccccagcagctccacattctgagacatcctgatatccatttcttgccacctcatagtgtgtctgcagtatctgacttcccaacccccagcctcagcacggaggcctctgaagaccgggctgtccctgcagggtttcctctgtgtcacaggcagcagacagggctgtgactccttacggaggctcttgcctgtccccagggtctgaaggattgttaggtgtccctggggggccagccatggagaatgggagcagggcagtccgggactgtttggggagctctgagccagcagggtggggctgagggggcaccttgagtgtcttgagggccatgaactttgggtcccatgatgggcaggcccatgagtggggccccaccccaagattttcttctcctgaaagcttttagaacttaactgcgacctggtgcagtggctcacgccttaatctcagcactttgggaggctgaggcaggtggatcacctgaggttaggagttcgagaccagcctggccaacatgatgaagccccatctctaataaaaatacaaaaataagctgggtatggtggtgcgcacctgtagtcccagctactcaggaggctgaggcaggagaatcacttgaacccgggaggtggaggttgcagtgagccaagatggcaccaccgcactccagcctgggtgacagagcaagactccatctcaaaaaaaaaaaaaaaaaaaacttaactgcagctgcactcagcagttggccttcctgatcgcagggacccccagtggctgcagtcctaagccctgcaggccacagggacacatgccctggaggggccgggagcgacgctgtaggtcccgctgccatcctggcctgacccagcagggcctggcagtggggtgtaggttggagaaaccatggagtgcttgagaaagaagagccatccaatacagaggtgccccctccgcccccaggcccagagactgtggctcaagccttggcccagggattctagcggatccactgctcctggggagaaggagagcttcactgtttctcacttgtccccatgaaccacatccgtatgatgctggcgttgtggccctcagagtctgtgagcactcttgtcccaccttgctctgaggcagcatggacattagggaaactgaggctgggctcatcccacccactgcatgaggccgcctttcaggctcgttagagagactccaccagccacccctgagctccaaccttggggggatgcagagatcggggaggcccaaggccacctcctcaggcccaaagggaggccactgcaggcaagatgaggtggcccagaggagccacatggggcctggaggccatctgggccgaggcagagccaccgtcacacgtggatctcagagacccacaggaagaggatggtggctgggagggctgaggcagtcccccagagaactgtcctgccaggccacaaggtcagtgagagggagcccggctcccaccccagggaccaggtgtcctttttcaggtccaggtggcagtgtccatcactccaggggcccccactggggaacttctgagaagccagggcatggagcaagagggtgatacccacaaactctttcctcatccttccctgatttgaaatggagggtgggatgcagaggagagaggtggaaagacaggtgcacagccccaggcctctcccccaccccctgcctcgcccaccatgtggctggaacggtgaccacccagcaagaacccatctcccaccctcaccagtgatcccggaaaaccagtcactggggtcccgcggggcatccgaaggccaaggcaagtcacctttcagaatgtcccctctgtgcagcctttccaggaaggaagctggaccgggccagctgcatggatgccaggacctctaggccctgagcatcagggggtccagcccaggacaccccaagcctgggcccctctccctgctgaagggctctggggaggcggggagaagccagcaggcatggaggctgcccatcccccagccatggcctggggccccacgcagctctctgcctcccccaggagaacccccgcctcacagaagacttcgtgtcccacctggagaccgagctggagcagtcgaggctgcgggagacggagacactgggggcccttcgggagatgcaggacaaggttctcgacatggaaaaggtgcaatggggaggcagacgggcaggtgtcggggggaccctggggcacaggaggggtcctggataagctttgggagtgaccccaggtcagaatcccccacccccatgcacacacaaccatacatatgcacacacacagcacaaccccacgcggggcatgcccacgctcctgtatgaggcaaactccagcagcgtggcagcttctatgagcttcccggatacctgcatcccacctgtgtgtgtttcccccagtactgggttccaggaaggaagggaggagagagggggatgggggagggggacaggaaggagagaaaggaaggcccaggcccattgtggctgcctccctacacattcccatgcagacaccatcccagggcttctgggttcctccccaactgctctctgacttggcatcgactccactctcccacggagctcccagaggaaggaaagcacccagggacccattcacacattcagcaggagccattccccaccccctcgagcctgcactattttgggagtcctcccaaatggaggactgagaggccatctgcttccaggccctcatcaccagccaagagctgggctccgctcccgcctccctccacttcatagggaagtgtgcctccaggacatgctgctagatctgtcccagccctagacccaaacacgggtcagtgcggacctcatccagaaagctggatttgggtcctggagcacaaatcctccatcaatgagccctgggacaccaggacagggccaaggctggcactcagcctgttcccagggagagggactgcctggcctggtgtggcctggcctgggggccagagggcagacagggtgtttctgctggggcaggtcctccacctgatcatgtccctgaggggatggatctcagacctcggggagtcagtgtgtgcagcgcggcgtttatgggggttgccctaggacaccctgtgagagtaggtgctgttactacacccattttatagctgaggaactccaaccgggttccacaggcgagtccgctccccgtgggccttgtcaagggggtcgccctcccccatctgagccgcccaaggcagagctcaggaggaaacgtggctgggggcgtttgtcctgcaggaagggccatgcggctgcgctgctcccccaggccctgaccccactcttcccgcagaggaacagctcgctgcccgacgagaacaatgtggcgcagctgcaggaggagctgaaggcgctcaaggtgcgggaaggccaggcggtggcctcgacgcgagagcttaaactgcagctgcaggagctctcggacacctggcaggtgagggccgggtgggcgccggcgggcagagcgccccctagggccatcccctcggggttcttgggcggaggctgaccgccggcttctcggcttcaccccccaggcccatctggcccgcggcggccgctggaaggagtccccacggaagctggtcgtgggcgagctgcaggacgagctgatgagcgtgcgtctgcgcgaggcccaggccctggccgagggccgcgagctgcggcagcgcgtggtggaacttgagacgcaggtggactcggggggcctgctcgttggggaaggggcgtggtgtccgtggccagcccctgagttaggccctgaccgccgccgtcctccgtcctcccttcctccctatcccaggaccacatccaccgcaaccttctgaaccgcgtggaggcggagcgcgcggcgctgcaggagaagctgcagtacctggctgcacagaacaaggggctgcagacgcagctcagcgaaagccgccgcaagcaggccgaggccgagtgcaaggtgcagacccccgcggccccgccctgcccgtggcaccgcccccggacgcgcccctacatgaggccccgcccccaatccgcctctgccggcgtcctgcctcccgatctgcccctgcccgcggtcctcccgcccccgcccgcggccccgcctcctgacctgctcctgcccgcgaccccgcctcctgatccggccccgcctcctgaccacccccccccgcggtcccgcctcctgatccgcccccgcccgcggccacgcctcctgacccgcccccgcccgcacctcccttgcccgcggtcccgcccctgcccgcggtcctgcctcctgacccgcctccgcccgcggccccgcctcctcattcgcccctgcccgcggtcccgccccctgatgcgccgcgccccctgacccgccctcctttccccccaatcccccgaccccagagcaaggaggaggtgatggctgtgcgactgcgggaggcggacagcatggctgcggtggccgagatgcggcagcgcattgccgagctggagatccaggtgatcggcggggccggggtcggggggcgggggcgggggcagggcccggggcaggagcggggccggaccccaggcccagcatggcactggccccgcgtgacctggcgcaccccgcagagggaggaaggccgcatccagggccagctgaaccactcggactcatcgcagtacatccgcgagctcaaggaccagatcgaggagctgaaggccgaggtgagccggcgcggggatgccggggacaggcctgggtgtcgtcggcctgggacgagccgagcgcaggtgccttgcggaggatgcggctgggagggcggggcagaaggccggtccacgcctgcagcgccggtcccccgccccaggtgcggctgctgaagggcccgccgcccttcgaggacccgctggctttcgatgggctgagcctggcgcggcacttggacgaggactcgctgccgtcgtcggacgaggagctacttggcgtaggcgtgggcgctgccctgcaggacgcattgtaccctctgtccccgcgcgatgcgcgcttcttccgccgtctggagcggccggccaaggacagcgagggcagctcagacagcgacgccgatgagctggccgcgccctacagccagggtctggacaactgaggccatgcccagcgcgcccggagtcaggaggccgcagccgcggggggcgcccgggcagtccgcgttctgctccccacctgccgcacttgacaaactacgcgccctctgtggctcggccacccctaaagcgaggcccggcgaggcagcgcagagggtagggtccgacctgggctcctcagggccccggggcaggctctctatccccagcagtgtttacccatcttggtctgtacccctccgggccctctggcgttccaggggtgcctggaggggctgactgctctcttaacaggagggcagagggcaggggacagacgacccagaggtcccagcactgaatgagcaggcagctcccacctcctggcaggcttccttctgggacaggggcgacattgctgggaagtgctcaggaggtagccgaggcctgaggaaggagagcgccagctctgggctggacatcagcaccccacaacactcctcgggatgaagtgacccttgactagcccctggccatctctaggggagtcaggccgctggggacagatggccaggccggcctctcctgcctggcgcaggcaccgtggcccctgcagcggaaaccaaagtccccctactatgtgcggggcgcctggggactgagtggctaacgggaagcctccctgcttctctggggccagagcagcttccaggaagtgaagagacccctctccccagtgccccacatctttctctgggagacactcgcgccccctatcctggccagtgatggaggggtatctctacaggggtcctcggtctccatctacttccctttcttcatgtgtttccagccccaccctcagccagagccaggcccccaggcaggagcttcccagcgagcggcctcccctcacttcctcctggtggtcccgttgtctctgctgaatcagagctgagaacggtgccaaaatccaacgatgccccccaggccccttcctcccttcccccggccccccgggcctcatgaccctgggggctgcccccctcggtgctcccggagcctccagtagagtagcgtcacaagcaatctccctggcgcttcctgggtggggacccctgctccgtccccgcttcctagctgcccacttttcagtgttacgaagcctggggaccggggcaggcacccacggggctctccacacgccccctacactgcccgccaccattttgcacactgcctgttcacatgtcgcccaggcgggaaaaatggaaaataaagtgtatttacacagtcacggactggcctgcgggctgggaggagaatcacaagcagcggtgggtgcccagcccagggaccaaaaaccgtgctgagggaaggtggggctgtccttgcccttaggagctccccacagtctcatagaatgggggtgggagaggatagaagggcattcagtttgggggcagggcatgatttcccacctgggtgaatcaacttgggcctcccctgaaggagagaggcatgccgaatcgctgggcttcaggaagcacaggacccggttgcattcattctgctcacgcctccaggggtaatgtggggtactctgccctgtgcctggctctgagggggtctccagtggagcagaggagacaggcactgggcagggggaagcctgcactaatgtggtaggtgctcaatagacaaatgtgcagggagatcagggaaggcttcctgggggaggtggtgtcagggcctcttcgaggggtaaaagcataaagatcagaccaacaggaggcataccatacctaggaaggaagaacaggaaagcctgggcgtggtcagactaagaagggactgcttacgtcaggtgagggagtttgggctttgaactgggggccattgggagcccatggagggcttaggtaagagagccccatcagatggaccacagagtctgtgagggggccagtgcagggaggacagtgagtagggggcagaaatagtcctttgtggggttccccacagagctgaggcagagtcccagctgctgggtggcggtgggtggcggggtggaggacagagccaggagtggcaaagcaaagcttcctagaggaactcaaggcagtcgactcactgaaacgtccatctcctgggttccagtgattcccctgcctcagcctcgagagtagctgaaactgtaggcacctacgaccgtgcctggctaatttgtttcgttttgttttttgagagggagtctcactctgtcacccaggctggagtgcagtggcacgatctcggctaactgcaacctctgcctgctggtttcaagtgattctcctgcctcagcctcctgagtagctgggactaccggcgcctgccaccacatctggctaatttttttttttttagacggagtttcactcttgttgcccaggctggagtgcgatggtgcgattttggctcactgcaacctctgcctcccaggttcaagcaattctcctgcttcaccctcccaagtagctgggattacagacatgtgccaccacacctggctaattttgtattatttttagtaaagatggggtttcaccatgttggccaggatagttttgaacccctgacctcaggtgatccacccgcctcccaaagtgctgggattacaggcatgagccactgtgcccggcccaatttttgtatttttttttttaagtagagactgggtttcaccatattggccaggctggtctcaaactcctgacctcaggtgatctgccctcctcggcctcccaaagtgctgggattacaggcgggagacacggtgcgcagcccctagaggcagaaacataattgggttcaggcagatgctagccaggacctgccctctgcacccagtgtgggtccacaaagtgctccctacccccatgcctcacagccaagcaaaggacatgacactgcttgtgtactgagacagccaagtcccatgtactgtcgtatcacatgccacagctctcctggccacacatggtgcagatgtaaccctggggaccctcacagtcactgtccgtgcctcctgcttccatggtaattccacccccgctggctgcccaggtcagggcaggaccgcagaggaattgtctgaggttctgccctgtccttcccggcagctggccttgagccccagctccccagcatgtcaggagtcggccttgggcttgtcccagagtctggaaacaaagacacccaggtccccaaccccaccagggcccagcttgagaggacacctctatggtttgccacaaaactctgaccgaaggactgtgctggcgtcctcctcctccacctcccaggggtgcaggtggcagtgcccctccaggccagagcccatttctcctcagaccccaggctaggaggtgccttgtctgggatggggacaggcaggacttgctggtctgtgactgacaggaacctggtcacaggatggtgtgagggtactgggtccaggggcagaggcagggctgagggcccaaggccagatcctactctgtcttcttacccacttggggatgtcaccatcattcttggtgccatgcaggagacccgggggaggaaaggcctagcaggggagctctctgcaggggcactgggaacagggagagactggctagggtttgagaggctccagagctgggggttagggttagggttcattgggggaggaagggcaggaaactctgattggagggggcctgtgaagatgtttgggaatctgataaggacgcctgaggaaggggttagggcaaggatgccatgggggtgggatgcaccaagtggcacttgtgtaaggacacttggagacagggtgcagtgtgaggactcccccatctcccacctagacctgggagaggccacttcttcctgcaatcccctaccagggcagttggcccgggaccctgcaccagccgaagggccatgggaaggggtcccccatccttgcctcagtgccctccaatcttcccacctgttccccaggagtgctagttccccgcatcgagtttgaaaagtgtgtcaggccaggcgcggtggctcacgcctgtaatcccaggactttgggaggctgagggcagatcacctgaggtcaggagttcaagactagcctagccaacatggtgaaaccgtgtctctactaaaaatacaaaaattagccgggtgtggtggcgcgcacctgtaatcccagctactcgaaagactgaggcaggagaattgcttgaacccgggaggcagaggttgcagtgagccgagatagcactattgcactccagcctgtgcaaagagagcaaaattctgtctcaaaataataaaaaaacaggccaggcgcggtggcttatgcctgtaatcccagcgctttgggaggccaagggggttagattacgaggtcaagagatccagaccaccctggccaacatggtgaaaccctgtctctactaaaaatacaaaaattagttgggcgtggtggcatgtgcctgtagtcccaactacttgggaggctgaggcaggagaatcgcttgaacccgggaggtgaaggttgcagtgagccgagatcgcgccattgcactccagcctggcgacaaagggagactccgtcaaaaaaaaaaaaaaaaaaaaaaaaagaattagaatagaatagaaaagggttccagtcgctccttcacctcggccacgcactgactcatccactcgggcgcacagcccctgccaggcccctcctgcaccgaacgtttccaccagaagtcggataccaagaagcccaagttcacacacgtggatgggtgcgcggcaccagatggccgggactcggcatggccccgccctagccccacctggcctgccccttctctcccagaagaggaaaaccgcactttatccagagctccaaccggttcgagcacagccgccagcaaggccttatctggcctggccccccgcgccgctcagcctgctggaggcccccagccccagtcctctctgtgacagcgaaggtgtgcaagtcccagtgtcccagttttattgcaaactcaggctgtgcggggtgggcaatacactgcacacggggcgggactcggggaaacggggcgtgtcctaggccaaaggggcggagctcgaggggcgggcctaggtcaaagctgtgggtaggtcccgagcctccgaggccaaaggctcaggctctagggagctaagactaatccacccagcggggctccagggcagtggaggcggggtctaaaacaaacggcgtacccggaggggcggatcctaaggcaggggtggggtgtagcaggcggggctgtggtctggctcagtggaaggtctccacctccaccacggtccagtcaccctgcggggaggccacgtcgtccggagagaagctggtgaccgaggtgatgctggcacgggactcgtccaggggagacagtagttcggcccagcggccgagttcggcgtcgctgagtgcagcccgggcgccccctgtgacgccaccaccctccgcacctcctgggcccccgccgctgccgcccgcggcaccctcggcagccgccagcagcagcgtccggctcagcaggtgctgcacgacgctcgcctgcagcgcccccagtggcagctcgcccaggcgcgcctgcttcgggctccgcgaggacgccccggccccggccccagccgccgccttcccaccgctcgtgccgggactgggccccggatccagtgcgccaggggcgggggtcgccgactcgggcccttcagtctcgtagatggtgcacagaccgtcagcagagcccggtccggtagcgggaggccacggcaggggcgcacctgcggggagagacgccaggtgggccgtgggggtgataagccccgcccctgcctcaaggtcccgcctccttgtctaagctccgccccggacccagctgtcccgcccctgagctgcgaagcctcgcctccgaccccgcccacagccaggccgggtctggggtgccccttacctggggctccgcggaaagccagcggcggagcggggcctcgactccaggcagccgggtggcaagcggcgagctctgcgtcggggggcggggaggctgcggcaccgccctcgggcccgctgtcgtagccacgcagctcctctggcgtgctcgtggcgctgctgctgtggccggccaggtctgggccgctcagcgtgctggacgggctgcgcgagggcggcggcggcgggccgggggccaacgccagggtcagccgtgggcccgagacggaggtatccggacccggggtcggggggcggcgtggggcctgcagggtgggtgaggcagggggagagggagggacctgcagaaggggcgctgccagaacaggtggggcctgtggaggaggcgtggccaaaggagacattgggagtgaggcagagggtgagaaaggggcctgcccagggaatgaggcaggcggagagggaagggcctgcagaggaggtgtggccagagcaggtggggcctgtggagggggcttagccaaaggagacattgggagtgaggcagggggagagggcgggacctgcagaggaggagcggcaagaaggggtgggacccgtggagggggcgtggccgaaggagacattgggggagaggcagggggagagggtgggacctgcagaggaggcgcagcgagagggggtggggcctgtggagggggcgtggctgaaggagacattgggggagaggcagggggagagggtgggacctgcagaggaggtgcggctagagagggtggggcctgtgaagggggcgtggccgaaggagacactgggggtgaggcagggggagagaaaggggcctgcactgggggtgagggagggggagagaaaggggcctgcagaaggtgcactgccagagcatttggggcctgtggagagggtgtggccaaaggagacagagggggtgaggcagggggagagggaggggcctgcagaggaggcaaggccagggcaggtggggcctgtggagggggcgtggccaaaggagacagagggggagagggcaggccctgcaaagggggtgaggccagagcaggtggggcctgtggaggaggcgtggctatggaagagggcgtctccggagggggcgtggtcaatggcgaaggtggtgcttgcagagggcatggggctggacaaggtggagtctccagatggggtgtggtcaggggagcagaagctgtctgcagaggaggcggggctagagaaggtaggttctccagagggggtgtggtcaggggagcagaagctgtctgcagaggaggcggggctagagaaggtaggttctccagagggggtgtggtcagggaagcaggaggtgtctgcagagagggtggggctagggaagattgggtctccagagggggcatgatcagggaagagagaggtgcctgaggagagtgggaggccagagaagatagcgcctgcagagggtgtatggtcaggggtgagcttaggggtgagacagcaggagagagagaagtctgcagagggggtgaggcaggaagggaaagaggggcctgcagagggggtgaatcagggggagtagaggccggccgagaaggtgagatcaaagaagcttgggtttgcctaggggacattgtcaggaaagaatgtgtggcctgcagagtgggtgagcccaaagaagttgtggcctgcagagaggacaaagccagaggagagggaggtgcctgcagagacggtgaggtcagagaatgtgggacctgtattgggggaatggtctggagagagggcggggcctgcatagggggcgtagtcatagaaggtggggcctgtgggtggggcggagcctgcagaggcggtgaggccaaaagagagggagaaactagaggaggatcctgcagagagactgtggtcaaaggagagggagaggcctgcagaggcaatgtggccagaagaggagagtcctgcagaggaagagtggccagagtgtggggcgtggcctggagagagggcggagacggggaaggactggcctgcggagggggcgtggtcagagcagaaaggcctggctgagggagtgcggccaggggaaaagccgaattccccagagatgttgccggagaaacagggccttgtagaggagacatggctgacagaggaggtgtggccaagggagagaggagagtcggaagagagggcaacgctggattagcttgggtggggggcatactctgcagaggggatgaaactgatggagagactgaagccacaaaagcggctgtggccagggaagagacgcctgcttctggaaaggacataatcagctgtgtgggtggaacttgcgaggggggcgtggctggtggagaggggagggtctgcagagaaggtggagcagagggagaaggaggggctagaggaaggggcgtggccaactgacaggtaaggctcgacgagtggggcgtggccggcagggtgggcggggcctgactttggagagcggctggcggagggggcgttaccggtggagagggagggagcgtggctggcaggggagtggctgcattgtcgggaggcggtacgggtcttgccttggtacccgatggagagggtgtggccaaaggagaggaagaaagcggtcctagtgctggggctgcgtccttccttgggggtgtgacctgagggggtcgcagagcctgcagtcctttcggcttgggctgcgagggatgcgcaggagccctgggtgttccgcgggctgagggcccagaacgggctggggaggagagaggggtggcgctggagctcagggagcgcgaggccggcctctggagacccccaccggcgctgggccgcctcctggcagccgggcttggctcggtggtactgtgctccgaggcgctgctcactgatttccgggggccctctgtcgggggccgtggccgggcactcggagctggccgggggagccccacctcggtgcccgcagcccgggaccgacgggccatggccggggacggggttcctggggtaggcccggaagtgtctggagaaaaagtagaaggccaagggtcaccgatacctctgaggcggctccccttgctgcccaggaaccccactcttctccaggtcacgtacctctccgtgccccagcgctgagggcactccttttgggagcctctgtagcttttcctctggccacagtttcctccgctgagatccggagtcccttctggccaagagggcctggcctggagacagaaggggccacgctcaggcctaggtctttgtttggcttcccaagtctctattttcccatctgtgaaatgggcatgtgccctctctgaggaccaataatggctttcacccaatttgtgcccagtgacctgcaagtgctcccgcgccccaactcgtgtaaaataaaaggttccagactctgtgacgctaaccctggcttaggagactgggggagagggagcaggttacctggtggtcccgctggcacgccctgggctagaaacagggcctgggctggtgttcttggcaggaggagctctctcccctctcccagaggctgggggcctggaggctgcggggagaaggccgagtcacaggtgccccggagaggtggcagtggaggtgagactggacaggtattggaagggggagggaagatgggggcggagctgaggaaggaggctggggtaccagggtttcgggaacttgtcccagcactccgcgttggtcccgctcggggagcagactcgggaatagtggccccgccgatgccccccgctcgctctgccagaggctttcgccccactgctcccgcagctcccagaactcggagggctgcgggagttactgggggagggggtcgaggagagcctgggggcctgggggtcagaagtccaggagcgcgagcagccggcgtccgcgcggcggcccctgccttcgccttgtctctcttgttgtccatcttgcacctgaagagacaaaccggtccgcatcccaggttctggacagctacgccgcctccagagacctggaccctgctacctcactgccctttcgcagcatcgccacccatggacactcaaacctcggcctcggcttccatccgctcggctcccacgcacctacacccactcgccagccccactgctcctcgctgtccccaagtcccaccccccaccgcttttccctaaagcgaagaggccctgcccgccccagcccaccgcctcccccgcctcggctccaattcaggaccgatctccacgcccctgccccttgccccttcagggactcagaccgccagcctcgagagcgggggactgccacgggctcaggatgtcgcatccctccagacccggagcgcacgcccgggtctccccgccagcccccatcggcctcccctggcctccccgagggatgcctgcacctgccgggaggcagagcggccccgctgcccgcgaacgggctccgggagacaaagagccgcgtcccgggcccgacccctcccccagccgggcctggcccgcgcccagcctctccacctgctcgcgtcgcgctcacctccgcctccggcctccggccgctcctcacagagtcgcctggggtggggcccgggccggagcgacgcggtggccgccagcggcgaggaggcgaggggagggggctgcgggctgcggcgccgggggagccgagccggtcccgcccctcggccgcgggcgggagagccgggggcgcgcgctcgatccggacccgggagcgcggccggcggaagcgcgccgagggggatgggggagaagcgcgctttggagagaagggtggcttctctgcggtccgggggaagcctgtttccccagctgcgcctgaggaacccagatagtcaacggttgggactgggggagcaaatccctggggtcctccactgtccttcccaacacatacacctgccccgacccccaccacaaccacctggcaccaaggaccgcctggacgcggataggctgggccctggcaaccaggaggcgggaccaccgcgcctctggcccacacaccaatccggccgctcggtggccctggcactatccagtccttcgcgtctgcgaaagctaggccgcccagggtctctggggggcagccgccctccgccccacacccgaaggtgttccccagacgccaggaaaccccttatctggttggggggtcgagggactgctaagagaatgctgccctgggaatttcaggatgcaaggtagaccccagattttggggaagataaagaaaggaataggagggagagcgacaggagacacagtatattctgtgagaggtgacccagccgtctgcagggtagagcacgcccaccctccacaccctcccagctaacgggatgtcaagtcagcccagacttcctggcagagctgggcttccgggggacaaggttctgtcgacctagcaggtgtcaaaacaagtgcataaggccgggcgcggtggctcacacctgtaatcccactgctttgggaggctgaggcgggcggatcacttgagctcaggagttcgagaccagtctggccaacatggcgaaaccctgtctctaccaaaaaatacaaaaattagccgggcatgctggcgagcacctgtaatcccagctactcgagaggctgaggcaggagaatcgcttgaacccgggaggcggaggttacagtgagccgagattgcgccactgcacttcagcctgggcgacagagtgagactctgtctcaaaaacaaaaacaaacaaaaaaacaaaaacacaagttcatgaaggacgcagaagatcctttacaagggtcccagcccagccggagcgagtgggaggtgtcctgttgctgacttcagccagggcaggggcctcggtggagagcggtgctccaggactgtggcatgaagagggtgggagcctgagggtggaaatggccattcctcagctccctctccttataagaagagtctgggccgggcatggtggctcaggcctgtaatcccagtactttgggaggccgaggtgggcggatcacaaagtcaggagatcgagaccatcctggctaacacggtgaaaccttgtctctactaaaaatacaaaaaattaaacgggcgtggtggtgggcgcctgtagtcccagctactcgggaggctgagtatggcctgagtatggctgagaatggcgtgaacccaggaggcagagcttgcagtgagccgaaatcgtgccactgtattccagcctgggcgacagtgcaagactctgtcacacatgcacaaaaaaagagtctggccttgtcacctctgtcggccaagtcccctcctcatatggcctccatgagctttccgcctggatgtcgcatccctccagacttacagccactttttaccccattccaggaaaccagcgccctgtgccccactgctaaccccatcgcaagctcatatgcacagttcactccctcctggaaatcagggggcctccatgcacaggaaacagataatgcaacttggcatcgggtgaactggggttggggggtagggacgttgcgcccatttgaggttgcagaaatggaaggcagagaaaaatgacagagctgaatgccatgctttgacctccagattggatcatcctaggccttatcttctccctcagtctagcaatgatcacccgtgtgaaccccttgtggcatgacaccagcctggttccctgtctacccacccacacccagtgcctccttccaaatcacatccaccaacacagatccctgccctcctatttatttatttttgagacaggatctcactctgtcacccaggctgaagtgcagtggcacgatcatcacagcttcacagctcactgcagcctcgacctcccaggctccagtgatcctcccacctcagcctcccaagtagctgggactatcagccgaggcgggtggataatttgaagacaagagttcaagaccagcctagtcaacagggtgaaactctgtctctactaaaaatacaaaaaaattagctgggtgtggtgcctatagtcccagctacttggaaggctgaggcgcgagaatcgcttgaacccaggaggcggaagttgcagtgagccgagatcatgccactgcactccagcctgggtgacagagagactccatctcaaaataataaaaaataaaaaataaaaataaaaaacaaaacccagatcacttgaggtcaggagttcgagaccagcctggccaacatggtgaaacctcatctctactaaaaatacacaaattagccgggcatggtggccatgcacctgtaatcccaactactcgggaggctgaggtaggagaatcgcttgaacctgggaggcagagggtgcagtgagccgagatcacgccattgcattccagcctgggcgacagagcaagactccatctcaaaaaaacaaacaaaaacaaaaacaacaacaaaaaaacaagtagctgggactaaagcctaccccaccatatcaggctaatttttaaattttttgtagaaacagagtctcgctgttacccaggctggtcttgaactcctgggctcaagtgattctcccacctcagcctccaaaactgctgggattacaggcaggagccacctcactcagcttcacctgccttctgactatgatgcaagggttcctccagggtacacaaaacccaccctgtaattaattgggatctggactctgccctcttataaaaacactcccaaaacctccatcaacaagagggatgagtaacatgaatcaaagtgtcccctacaatggaatgaaacttggcaacagaaaggaacagactatgctactctcaaaacagggactaatctcaaaagcacaccgaacaaaagaagctacaaaaaacacgcactgtatgattccatttatagaacattccagaaaatgcgactaatctgtagttacagacagcacatcagtggttgcttggaacaggtgggggagggacattgaatgaactgcccagcgtagccactcttaggcatgtgactctcaggtgagggccaggcgactgtagtcccagctactggggaggctaagacaggaggatccccttgaggccgggagtttgaggccagctagggaaatataaggagaccccgtctctaaaagaaaaataaataaatcacaaatatatatgtatatgtgtgtgtgtatatatatacatatatacatatatatacatatatacatatatacgtatatacgcatatatacatatatacatatatacgtatatacgcatatatacatatatacatatatacgtatatacgcatatatacatatatacatatatacgtatatacgcatatatacatatatacatatatacgtgtatacgcatatatacatatatacatatatacgtgtatacgcatatatacatatatacgtgtatacgcatatatacatatatatacatatatacatatatatatatattttttttttgagacagagtctcactctgtcacccaggctggagtgcaatggcgtgatcttggccctaatttttaattaattaatttatttttgaggcggagtttcactcttgttgcccaggctggagtgcaatggtgcgatatcagctcaccgcaacctctgcctcccaggttcaagcgattctcctgcctcagcctcctgagtagctgggattacaggcatgcgccaccatgcccggctaattttgtagttttagtagggatggggtttctccatgttggtcaggatggtctcgaactcctgacttcaggtgatccacccacctcggcctcccaaagtgctgggattacaggcgtgagccactgcacctgggcatatatatatatatatatatttttttttttttttgaggaagcaatttctttaattttatcagaatccaggacacaacaagaaaagcacccaaaaaccacatggagacagaagatgagacacaactcctcccccaccccttccctgctctagagtggggacaaagtcagagtgagacagcttgggggagacctgaacctcagtccagccctacaggctccaggcctgcagggaaggagggtaatggggaggcagggcccagccccccagtttggggaaacagctgagggaaggcccccctcaaaaggctccacctcctcaccagcactcctgcccagggacagggagcccacagcagcaaggggacctcagggccatggccaccttcatgactgagaagtagctgagtggaggcaggagacacacgattatctgggcagaatcagttagagcaggggcctggaagggccccatgggccaaaccctgaggtcacaggaggggccccaaagcggggctagtgagtgaggtcctgagtgagtgggtcagcagctgggcccctttctctagcttcctgtagcccctccaatactgctgccagggaggcctgcctccagggaaatgggataagaaagcagcctgcccctgctgcagacagagccaggtggctgaggccaggaaggaaagcccggccaggccttgccacctgccccagaggcctgtgggaaaaggacaggccaggaagggtggggacaggggctcgactggctcagatccaagatggtgccacgcttgcttgctgagtcccccatgagctggggcaccgcactggggccagcgactagttagacagaaggcagcaacttctccaagaaattccttcacagctgccatctcctgaggacagcagctgtgcatgacacccgagtatgtcttgaactggaccctggcaggtgtgacaacagccgtcagggtcccaaaccgtacgggcaccatggggtccagctccccatggcactggaggatggtcaggcccttgccactgcctttagctgcctgggggaaggcccggtgcagaggcagccagcagctcgatgctacgataccagccagcgggtgggggcaggtgagggccgtgtagagggacagggccccgccctgtgaaaagcctcccaggacgattcgattggcagggatcccgttcttcatttcatgctcaatcaaggccttgatgttctctgctgccttcttgatgccagcctcgtcctctggggcatctggactcagccccatcaggtcaaatcaggaaggtgtcaccatcttcatgttgagagtcacagggatcctaggcacatggggacagatggaattgacgtgagggagccggacggtggagagggcgtcagcccagctgtgccctgtgtctccaagtccatataaaaaactaaccgcggctgtttcccgctcagctccagacaccgcggcagcatcagtgagaggggcgtagacgtggtgttaccacacatacaccacatggctccacggcgggagcctccactccctggggcttccgaggccgcttgggcgattctcctctttctcccgcagacacacactcttccccctcggccacccccactccatatatatatatgtatatataaatatattatatatataaatataaaaaaatatataaatatattatatataaatataaaatatacatataaatatattatctataaatataatatatataaatatattatctataaatataaaatatatataaatatattatctataaatataaaatatatataaatatatttatatatatataatatattatatatatataatatattatatatatataaatatattatatatataaatataaaatatatataaatatattatatatataaatataaaatatatataaatatattatatataaatataaaatatatataaatatattatatataaatataaaatatatataaatatattatatataaatataaaatatatataaatatatataaatataaaatatatataaatatacatatattttttttttgagactgagtctcgctctatcacccagtctggagtgcagtggcgcgatctcggctcactgcaagctgcttcccaggttcacgccattctcctgcctcagcctcctgagtagctgggactacaggcgcccgccaccatgcccggctaattttttgtatttttagtagagatggggtttcaccgttttagccaggatggtctcgatctcctgaccttgtgacccacccacctcagcctcccaaagtgctgggattacaggcgtgagccaccgcgcccagctatatatatattttaaacagtgaggggctgttttgttttgttttgttttttggttttgtttgttcgtttgtttgtttggatggagtcctgctctgttgcccaggctggagtgcagtggtttgatctcagctcactgcaacctccacctcctgggttcaagtgattctcctgcctcagcctcctgagtagctgggattacaggtgcccaccatcacgcccggctaattttttgtatttttagtagagacaagttttcaccctgttggccaggctggtcttgaactcctgacctcacgtaatccacccgcctcagcctcccaaagtgttggtattacaggcgtgagccaccgcgcccagcccctaattttgtatttttagtagagacggggtttcgccatgttggccaggctggtcttgaactcctggcctcaagtgatccacccaccttgacctcccaaagtgctgggattacaggcgtgagccactgcagcccagccaatacatacttttttaaagctagtaaatttttgggtaatttgttacaaagtaatagctaactcacattccaaaatcttagaagctggatagtaaataacaagtactgaggggcgatgtggagaaattggaacacaggtgtcctgttgatgggaatgtaaactggtacagctaaacccagtgcagtagctcatgcttgtaatcccagcacttagggaggctgaggcaggccgatcacttgagctcaggagttcaagaccagcctggccaacatgacaaaaccccgtctctactaaaaatagaaaaattagctaggcgtggtggtgcatgcctgtaatcccagctacttgggaggctgaggcaggagaatcacttgaacccgggaggcggaggttgcaatgagccgagatcacaccactgcactccagccagggcgacagagtaagattccatctcaaaaaaaaaaaaaagaaagaaagaaaagaaagaaatatttgtaccctcgtgttcatagcagtagtattcgcaagaaccaaaaggtggaagcaacccccaagtgtccaccagcagaggggtaaatagataaaatgtggttcatccatgcaatggaatattatgcagccctgaaaaggcagaaaattctgatgcatgctgtgacatcgatgaaccatgaggacatcatgctcaggggaataagccagacacaaaaggacaaatcctgtgtgattccacttgtaggaggtccctagaggagtcagattcatgggagacagaaagtagaatggtgggtgccagcagctatgggagggaggtggggagttagtgtttcatggggacagagtttcaatttgagaagatgagaaagttcgggagatggatgttggtgatggttgtacaaccatgtgaatatgcttaatgccacggaggtgcacacttagaaatggttacaatggctgggcacagtggctcatgcgtgtaatcccagcactttgggaggctaaggccagaggatcgtccgagaccagaagttcaggaccagcctgggcaatatatcaagaccccgtctctacaaaaaaaaaaaaaaaatctaaaaaatagctgggtgcggtggcacacacctgtagtcccagctacttgggaggctgaagtggggaggatcacctgagcccaagggttcgaggctacagtgagctatgatgaaaccattgcacaccagtctgggtgacagagcaagacctcatctccaaaattaaaaaaaaattaaactggccaattttatattatattggaccaaaatttaaatttttttcttttttccttttaatttcaggagaaaccttaaaagccaattgaaaaaatatgtcttctttcttagagacgatgcctcactctgttgctcaggaaggagtacaatggtgcaatagtagctcactgtagcctcaacttcctgggcttaagcatttctcccacctcagtctcccaaatagctggaaccacaggcatgcgccactgtgcccggctacttttttttttttttttttttttgtagagacggggtctcaggtctcactgttgcccaggctggtctcaaacccctgggctcaagcgatcctcctgcctcagcctcccaaagtgctgggattacacgcatgagccaccgtgactgacccatattttttttaagctagatattatcatgtggaaagactcacacagtagcaatgggaatgtaaagtgggcagcctttctgataaataattggaaaggattgagtattggtgtgctatgactcagccatcccactcagcatctatacctgcagcaggtgcatctatacctgcggcaggtgcatctatacctgcggcaggtgcatctatatctacagcaggtaccataccaccctgtctatatccctgagcactcacagtccctgtgggcagggaactcagaagtgccagagagttaacacctctccacctcccttctctggagcaacccttaggcagggacagacaggagctggtggagaaatacttcaatttcctcgaccctgtaatcccagctactcaggaggctgaggcaggagaatggcttgaacccgggaggcggaggttgcagtgagctaacaccactgcactccagcctgggcaacagagctagactctgtctcaaaaaataaaataaaaaagatgctaggccgggcgcggtggctcacacctgtaatcccagcactttgggaggccgaggcaggcggatcacctgaggtcaggagtttgagaccagcccggccaacatggcaaaaccccatctctactaaaaatacaaaaattagccaggtgtggtggcacgtgcctgtaatcccagctactcagcaggctgggagactcacttgaacccagtgaggttgcagtgagctgagattgcaccactgcacttcagcctgggagacagagtgagactccatctctcaaaaaaaaaaaaaaaaaagcttatttcagcatgtggttgcaaacatccccagggcacagatcccaagaaacctctcagaagacaggaagtaggccaggcatggtgcctcatgcctgtaaccccagcactttgggaggccaagacggtaggatctgcttgggcccaggagtttcagaccagcctgggcaacatagtaagactctgtctctataaaataaataaataaataaataaataaataattcagcagatgtggtggtgcatgcctgtggacctagctacttgggagggagggtgaggcaggaggatcacctgagcccaggagttcaaggctgcagtgagctaggatcatgccactgcatgccagcctgggcaacagagggagaaaaaaaagaagaatgaagaaggaggaggaggaaaggagaaggagaagaaggaggaggagaacagaaagtggaggaggagaaggaggggaaagagggaggaggaggaggggcaaagaaaaaggaaaggaaagaaagaaaagaaaggaaggaaggaaggaaggagagaggagggggaggaggagggggaggagaaggaaggcaaggaggaggagagggaggaggagggggagggggaggagggggaggaggaagatgggagggggagggggaggagagggaggaggaagatggggagggggaggggaggaagggggaggagagggaggaggaagatggggagggggagaggaggaggggggaggagagggaggaggaagatggggagggggaggggaggagggggagggggagggggaggaggaggaggagaaggcgaaggcgaaggcctagtgcagtgactcacacctgtaatcacaacactttgggaggctgaggcaggagttcaacaccagcctggccagcatggcaaaaccctgtctctactaaaaatacaaaaattagccaggcacagtggtgggcgcctgtaatcccagccactctggaggctgagttaggaaaattgcttgaacccaggaggcgaaggttgcagtgagcccagatcgtgccattgcactgcagcctgggcaaggactccatctcaaaaaaataaagaaagaaaaagaaggccaggtgcgatggctcacgcctgtaatcccagcactttgggaggccgagacaggcagatcacctgaggtcgggagttcgagaccagcctgaccaacgtggagaaactccatctctaccaaaaatacaaaattagccgagtggtggcgcatgcctgtaatcccagctactcgggaggctgaggctgggaattgcttgaaccccggaggcggaggttgcggtgagcagcgatcacgccattgcactccggcctgggcaacaacagcaaaactccatgaaacaaagaaggaaagaaagaagaaaggaaggaaggaaagaaggaaggaaggaaggaaggaagacaggaagagtcactccaaaggagagacaacctttctcacaggtcccttcctcaaagcggtcttcaaggaaccccttgtcccttgctaccgcttcaccttgctttgttatatatacaacatttgtcacaaactggcattaccttgttcttccgtttgtcttttgttttgttttgtttttaaaagccaggttctgagctgccacccaggctggagtgcagtggtgcaatcatggctcactgtagcctccaactcccaggctcaagtgatcctcctgtctcagcctctcaagtagctgggaccacaggtgcacaccatcacacccagctcatttttatttacttatttatttatttttgagacggagtctcactctgttgcccaggctggagtgcagtggtgcaatctcggctcaccacaacctccgcctcctgggttcaatcgattctcctccctcagcctcccgagtagctgggattacaggtgcgtgccactacgcctgactaattcttctatcatttttatttattttttgtagagatgggatctcactatgttgctcaggctgatctcagactcctgggctcaagcgatccacccaccttggtcagcctcctaaactgctgggatttaaggcgtgagccaccccacctggtctcctttattagtttacttagtgtatctctcccacccactaggacagaagctctcagagagtagagagccttgctggtcttgtcctgcaaggaagctgcagatgccgacagacaacaggtgctcttaaagctctactaaatccaaaaggaagttttgtctttggactccctgtggcggtgcccagaaggtccctgacttacaagtttccaaccctagaggtttccagtcgcaggcccagacctggtcaatgtcagggcttttttttttttcttttttcttttgagacggagttttgctcttgttgcccaggctggagggcagtggcacgatctcggctcacggcaacatccgcctcctgggttcaagcgattctcctgcctcagcctcccaagtagctgggattacaggcttgtgccaccacacccagctaatgttttgtatttttagtagagatggggtttcaccatgttggccaggctggactcgaactcctgacctcaggtgaatcacccgagtcggcctcccaaagtgctgagattctaggcatgagccaccgcgcccggccaagtcaaggcttcttttaccctgtcagggagaactctccgtctcccatcctaagtccaggtaggaacatttccatggatggtttggttttgttttgttttgttttgagatggaatcctgttctgtcgcccaggctggagtggggtggtgcaatctcagttcactgtaacctccacctcccaggctcaagcgattctcttgtctcagcctcccaagtagcacaagccaccacacccagctaatttttgtatttttagtagagacagggtttcaccatgttggccaggctggtctcaaacgcctgacctcaggtgatccaccctcctcagcctccgaaagtgctagattacaggtgtaagccactgtgaccagcccaagcctacagcacccggtattcctaggtggtctcccatccaagtactaaccaggtccgacactgcttagcttgcgaggtgagacgaggatcagatgcttttagggtggtatggccatagatacatccaaggtttttcttttcttttctttttttatctttttttttttttttttttttgagatggagtctcactcttcgcccaggctggagtgcagtggcgcaatctcggctcactgcaagctctgcctcctgggttcacgccattctcctgcctcagcctcctgagtagctgggactacaggcgcccgccaccacgccctgctaatttttttgtatttttgtagagactgtgtttcactgtgttagccacgatggtctcgatctcctgacctcgtgatccacccgcctcagcctcccaaagagctgggattacaggcgtgagccactgcacccggcctccaaggtttttcagacggagaacagatcaaggtccacctccacagatttgctcatctaagacccagctcaggcctcccaagtggggcggccagggtgggggtggggaggcagagaagctgggccccccaggacttcggagctgcttgtgccccactccccacctggagggcagaccacagtgttgggcagggacagacaggagggcatccccactctactcaacttccgttggttcagcccagttcccgcccatggccagagcttgaagggagaagccgtcccctccccgtcctctcctcccgcaactccactcccagcacctgaaaactgcagtcacctgtgccttggctgggctttaaggccaggtgactgggccttgcggggttagaaggagcccttccgcacttcctctttttcttttttttcttttggagacagggtccttcttggtggcccaggctggagtgcagtggcatgatcgtagctcgctgcagcctctcaacttcccagattcaggtgatccttccacctcggcctccagagtagctgggactacaggcacacaccaccacacctggctaatttttaaaattttgtttttgtaggttttaaaattttttgtagagatgtggtcccactatattgctcaggctggtttcaaactcctaggcccaaggtatcctcctgcctcggcctcccaaagtgttggattacaggcgtgagtcacagagcccggcctccacattttctcgacagggtccgtaagacctggttcccagaaaggtggccgtagaatggctttgggagttcagcgtccccagctccctcagtttccccagctgccagggtccagccagactgcaaagttgcaaagttctaagacccctgcatctcccgccagccccgagcccaccagggcaaagcagcctaagacggctgtcttcccccaaccctgctgatcgcgcggcgcctggagtagggtcgacctgggcgcgcctgcggcgaggcggggccgagtcgtccgggggcggggcggggcggctccgggtctcctgtccccgcctgccctgactcaccctcgcggcccgcccgggaactctgcgggagtcgcggcagctccgctcccagagacccaggagttgggcccagcgtccctcccggaacggtgagtaggtggctctttgcctctggacaccccacgaggtggcagggtgggggtcgggctgggagtccccgggtctggacaaggggcagagccgctccaggtgcgccggccctgtggccggggcaggccgtcccgacacaccaggagctggggtgggggtgccggccggtgcaaagggaaacctggcccacgaggtgcccgtcctgggagccaggcagacgcggccaagtctcagagtgaagataaacaggctgaagataaacttgactttgggggtctcaaccactttcccctccccttggcatctgggaagacattgacaactcatccccgggagactctcagagctccagaacctaccacttggggtgggttcaaccaagcctgacctctggtgctcttgaacttacacatgtcccagatcttcaagtctgctggcagaggcggcttggaaaaccactcggctgggaatccgcaggcctggggcctgacccaggacgggctacaaagatgccaccctcccccaccctagaccctcagtttctcccttgcataaatggttgaggctcagccggacaccgtgccttacgtctataatcccagcactttgggaggccgaggtgggcaggtcacctgaggtcaggtgtttgagaccagcctggctaacacggtgaaaccccatctctactaaaaatacaaaaattagtggcgtgtccctgtagtcccagctactggggaggctgaggcttgagtactgctcggacccaagaggtggaggttgcagtgagttgagattgggccactgcactccagcctgggcaacagagcgacactccatctcaaaaaaaaaaaaagattgaggccaggcacagtggctcacacctgtaatcccagcactttgggaggctgaggtgggaggattgcttggactcagaagttcaagaccagcctgggcaacatagcgagactccatctctacaaaaaatctaaaagttggctgggcatggtagcacgcacctgtggtcccagctactggggaggctgaggcaggaggatcacttgagcccaggagttcgagactactatgagctatgatcgtgccactgaactccagcctgggtgacagagcaagactctatctctctctctctctctttttttttttttcaagatagagtcttgctctgttgccaggccggagcgcagtggcacgatcttggctcacggcaacctccacctcccaggttcaagcgattctcctgcctcagcctcctgagtagctgggactacaagcatgtggcaccatacccagctaatctttgtatttttagagatggggtttcatcatgttggccaggatggtcttgatctcttgacctcgtgatccacctgcctcaacctctcaaagtgctgggattacaggcgtgatccactgtgtccgtcaggactctatgtctaaaaaaaaaaaaaggttgggccttgttttctacaaaacccctcttagggctgaaaactgctggatgtttcttgcttcttccctgcctcttagcatgggctgtgggtgtggagggtctcactctcccacccttcccccagcaggaactcatcaccacattttttggaggcaagtggcttgaggaggacctgggagggaggaggggtgaggcatgggtggatggagccagggctggtgggagccacatggtctcaggctggaaagccttccagcctggcctgccacaatgcaacaccgctcttaggtgcttttggcaaagatgctgtggtttttttgttgttgtttgttttttgagatagagtcttgctctgttgcccaggctggattgcagtggcgcaatcacggctcactgcaacttccacctcctgggttcaagagattctcctgcttcagccgggcacggtggcgcacgcctgtaatcccagctctttgggaggccgaggcaggcagatcatgagatcaggagattgagaccatcctggctaatacagtgaaaccccgtctctactaaaattacaaaaaattagccgggcgaggtggcgggcgcctgtagtcccagctactcgggaggctgaagcaggagaatggtgtgaacccgggaggcggagcttgcagtgagccgagatcacaccactgcactccagcctgggcgacagagtgagactctgtctcaaaaaaaaaagagattctcctgcttcagcttccccattagctgggattataggtgcccaccaccactccagctaattttgtatttttagtagacatggggttttaccatgttgggctagcctggtctcaaactcctgacctcaaatgatctgcctaccttggcctcccaaagtgttgggattacaggcgtgagccaccgtgcctggcaagatgctgcattttaattagaggctgtctcccaagagggaacagagcagttgcaatcctacaggcaggacctggaggttggatgggtcaggcttcgaatgccgcttggaactgtagaagcttgagcaagttatttctctcccctgagtctggaaagcaaagtctccgacatccacgctgcctgggttgggataaaatgaggcattcagtgtctggtggagaaagctgagcgtatacgtcccatcgttttattttccctggctctgccccaattcttcgagcccctgttcctggaccttcccaccagccctgctcagacaaagtgggggcctattttatgtctgtggaaatttaatggcaggtttgtgaggatcaagtttgagtcatggagacagataatgatagcccctgtggctgccccccggtcccctgagtgttgctgccttcttgtctgcgattgtgcacctgggatggctattggtggagcttacaccagggtggcaaggacaggaagttggtccctgctcgggtgtgtgtgtgtgtgtgtgtgtttgtgtgtgtgtgtgtgtgttgtgtgatttcttctgcagcctccagagtcaggagtttttgttttgttttgtttttttgagacggagtctcgctctgtcgcccaggctggagtgcagtggcgagatcttggctcactgcagcttctgtctcccgagtttaagcaattctcctgcctcactctcctgagtagctgggattacaggcatccaccaccatgcctggctaattgtttttgtatttttagtagagacgaggtttcaccatgttggccaggctggtctggaactcctgacctcaaattatccgcctaccttggcctcccaaagtgctgggattacaggcgagagccaccgcgcccggccccagtcagtagtgttttgcttgctgtgtttgagatagggtcttgcccaggctggttcatggctcactgcagcctctaactcctgggttcaagcaatcctcccacctcagtcttccaagtagctgggactacaggcatgcaccaccacacctggcaagattttagattttttttttttttttgagacggagtctcgctctgtcgcccaggctggagtacagttgtgcaatcttggctcactgcaggctctgcctcccaggttcacgccattctcctgcctcagcctcccaagtagctgggactacaggcgtctgccactatgcccggctaattttttgtatttttagtagagacggggtttcgccgcattagccaggatggtctcaatctcctgacctcgtgatccacccacctcggcctcccaaagtgctgggattacaggcgtgagccaccgcacccggcccaaatttttagatttttttgtagaaatggggtctgactatgttgtcctggctgctcaaactcctgggctcaagcaatcctcctgcctcagcctcccaaagtgctggaattacaggcctgagccactgcacccagcctggggtcagcattcttaggtaaagcaactgagcagtgtccctgcaggatccttggaggactcaatggatggccggaaccaaaacaggacgtgagggtccctggtgctgggtccctccgaagctcagtgtgtgtacttggactttataccctcgtgcacaaatatgcatgacccaaaatgaccccaagcgtccattttggtgggtgcaatgtacatattcttcccctggggacagttgagctatcctggtatgtttctaccagattacatactggtgacccaggcagactgggatatttgtagtcgggtttcttttctcttctcttctcttttttagagacagggtcttgctctgtcgcccaggctggaatgcagtagtgcaatcttggctgactgcaacctccgcctcccgggttcaaggggttttcgtgcctcagcctcccgagtaaccgggactacaggcaccctccaccatgactggctgttttgtatttttatttttattttgttttagttttgagacagagtcttgcactattgtctgggctagagtgcagtggcgcaatctcagctcactgcaacctctgcctcccaggttcaagcgatcctcctgcctcagcctccctagtagctgggattacaggcacctgccaccacgcccagctaattttttgtatttttagtagagacggggtttcatcacgttggccaggctggtccctaactcctgaccttgtgatttgcctgcctcggcctcccaaagtgctgggattacaggcgtgagccaccgcacctggctaatttttgtatttttaatagagacggagtttcaccatgttggccaggctggtctcgaactcctaacctcaagtgatctgcccacctcggcctcccaaagtatacttggctttttgcttagggcagggagtgtgaatgagcatgagggccaggccatggtgcgaaggaccctgtgctctgggcacccccttgcatggatctgggtctgggtgagtcactgcctgagtcagggaacccatgacttttttttttttttttcccgagacagagtctcgctccgtctcccaggctagattgcagtggcacgatctcagctcaccacaacctccgcttcccgggttcaagcgattctcctgcctagctgggactacaggttcatgccaccatgcccggctaatttttgtatttttagaagagacggggtttcaccatgctggccaggctggtttcgaactcctgaccttgtgatccgcctgccttggcctcccaaagtgctgggattacagacgtgagccactgcgcctggcccaacctatgacattttacacttgcatggtgagtccccgtgtgggcaggctgtacccacacccttgcctgcctatctgattccccagactgaagtgggggcctctgagggggtaaaaggatgtggtctttcgggactgcttggcctttagcttggtgggtggagcctgtatcctaccttgttttaacccaggagtcaccccaaaatatgggggggacacaaactgaaaagggaggctcagacatgtcagaaccattggctgagtcgtgggtcaggggaccagggtttccctagattcttcctggggagatggatggggagccagagataactccctgatgggcagatgccctccttcttggcccaactcctgtcccgttacagattatctttgtcttttgttttgtttgtttgagatggagtctcactctgtcacccaggctggagtgcagtggcacggtctcacttcactgccacctctgcctccccggatcaagaccctcccacctcagcctccagagtagctaggattacaggtgtgtgtcaccacacctggttaattttttgtgtatttttagtagactctgggtttcaccatgttggcctcactggtctcgaactcctaacctcaagtgatccacctgcctcagcttcccatagtgctgggattacaggcatgagccaccgcgcccagccccagttacagattatctatctggacaaggacaggaggctcccaggagtgggggaacttggatgttggcagaagtgggctggtctaaggttccccaccttccttgttccacctccagcctctggggaagtaggtacctgcctgggagagtgacatctcagctcatgccccacgccccagtgtgatttgtggctggcctgtctgtatctgtaatagtgatagcttggtctaaaaggagaccctgggaacagacagagtgggccggccaggagcctgacagcacagccctagcctggtcgcagatgtcacctgacaactttccatttgcaaatcctccttcctcctcggacatccggacaccccattgccccctctcagagcccaggtctctggtttctgcctgtgattctgggctgtagcccctttagaaactcaggtgtcctggtcacctcctacccccagggctgactagccttcagcttggcagtccctgcccctggggccctagtaaccagagccaggctccagccggcttttccggttagaggttggaggtggtgcccagagtgcccctggagggggtggaggggcctacgccccggaagtcctgagccttggaacgctttcaggcctggtggcggtgggagccggggctggcccagacgctgagtgtctgcagtcagggagcatcgaggcagatgttttcaggccttggtgtcaggggtgggagagggatgcctcgttttggggagggggccacccgaggaggctggagggcggcggccctgtggactatccctcatgtgctcttcgaggtcagacaagtcagatcaggtgcaggggtgcccagaggggaacagtggccgcttggttctgggcaggtggtgacgtctgcatggagggtgactaaggccaggctaagagggaagtgggggcacacactttggtggtttggacaagtttgggcagggagggtcacaggcctgcctgtgtccggctcctcggaggaccccctgcagagcctcccatcctgagggtctctctctacaccccccgtctcgtcccgtcccacaggcagcatgatcccagtggccgagttcaagcagttcacggaacagcagcctgcgttcaaggtgctcaaaccctggtgggacgtgctggccgagtacctcaccgtggccatgctcatgattggggtctttggctgcaccctccaggtgaggccctcccctggcaagggggtgtgaccagaggggcggggcaggtgtctggggaagtcgggaagccttctcatcacccaagaaagagaggaaactgaagacagagccccactcaaaggccaatccagaccccttatcttccttacctccatagccaggagcaccggagtccccacattgctatgccattccatatctttttttcttttttgagacggagtctcactctgtcacccaggctagagtacagtggcatgatctcagctccctgcaacatctgcctcccgggtacaagcggttctcctgcctcagcctcctgagtagctgggattacaggcgcccaccaccacgcctggctaattttggtagttttttagtagagatggggtttcaccatgttagccaggctggtctcgaactcctgacctcaagtgacctgcctgcctgggcctcccaaagtgttgggattacaggcctgaggcactgcacctgaccctttctttttttttcttttttttttttttctttttggctaaaaagagacaggggccgggcatggtggctcacacctgtaatcccagcactttgggaggccaaggtgggagtatcacttaaggccagaagtttgagaccagcctggccaacacggtgaaaacccgtccttactaaagacacaaatattagccaggcatggtggtggacacctgtaatcccagctacttggaaggctgaggcaggaaaattgcttgaacctgggaggtggaggttgcagtgagccgagatcatgccactgcactccagcctgggtgacagaacgagactccatcttaaaaaaaataaaataaaataattgaaaattaaaataaagaaacacggtctcattctgtcatccaggttggagtgcagtggcatgatcacagctcactgcagccttgaactcctggactcaagtgatcttcccgcctcagcctccagagtagctgggattacaggcacacaccaccacgtccagctaatttttaaatttcttgttgacacaggggtcttgctatgttgcccaggcttgtctcggactccgggcctcaagccatcctcccacctcggcctcccaaagtgctgggattacaggtgtgagccactgtgtccagccccatattttcacaatgctcagttttatccctagaatctggaaaggactgcagttgctatatgagtttgttacttctgttgtaacaaagtagcagggattgagtggcttaaataaccagaaatgtttcctcttctgggtctggttctggaggccagaagtctgagatcaaggcgtcagttgtcagtgagggagaatcttccaagcttccctcctagatttttgcagctccaagagttccttggcttgtagatgacattctcccagtatttttctttttctttttcttttttttttagacagagtctccctctgtcgcccaggctggcatgcagtggtgcgatctcggctcactgcaacctccgcctcccgggttccaacaattctcctggcttagcctcccaagtagctgggattacaggcgtgtgccaccacgcccggctaatatttttttgtatttttagtagagacgtggtttcagtatgttggccaggctggtcttgaactcctgacctcgtgatcaggatcagcctgcctctgtctcccaaagtgctgggattacaggcatgagccactgcgcctggtcgagacagttttttttttttttttttaagcaagctctgtcacctaggctggagtgcagtggcgcaataatagctcactgtaaccttgtactcctggcctcaagcaatcctcctctaccacccccgcttggccccccctcccactgcctcccaaatcactgggattacaagcctgagccaccgcacccagcctctccctgtatcctcacgtcatcttctgtctttgtgtctgtctctgtgtctatgtttcccctttctctaaggcgcagtcatactgggcccaccctactggctttgtcttgactacctctgcaaagaccctattaccaaacaggagccgcctgacccagctcaaataataccacattctaaggattcggagttgggacttcaacatcttttgtggggacacgattcaacccagctccttttctcagacaaagaccagtgctttgtcagttgtggtggctcattcctgtaatcccagcactttgggaagctgaggcaggggatcacttgaggccaggagttcgagagcagcctggccaacatggtgaaaccccatctctactaaaaatacaaaaattagctaggcgtggtagtgcgtgcttgtagccccggctactcagcaggctgaggcaggagaattgcttgaaccaggaggggaaggttgcaatgagccaagattgcaccactgcacacagcctgacagagcgagactcttgtctcaaaaaaaaaaaccaaaaaaaaaaaaaacagtgcttagaggtttagcaaaactcttccaaaatcacagctggctggcaacagtcagagatggggggtgcggggggtctcccaccttcagcctgctttttccccatccccctcattttctctcttttttaaattaatttatttttgagacagaggctcactctgtcacccaggctggagtacaatggcgcgatctcggctcactgcaacctccatcttccgggttcaagcgattctcctgcctcagcctcccgagtagctgggattacaggtgcccaccaccatgcccggctaattttgtatttttagtagagacagggtttcaccacgttggccaggctggtctcgaactcctgacctaaagtgatccactcgccttggcctcccaaagtgctaggattacagccctcattctcttttgctcctcaggtgacacaggacaagatcatctgtctacccaatcatgagctccaggagaacttatcagaggccccgtgccagcaattgctgcctcgggggatccctgagcagattggggccctgcaggaggttaaaggccttaagaacaatttggacctgcagcaatacagctttattaaccagctgtgttatgagacggccctgcactggtatgccaagtacttcccttacctcgtggtcattcacacactcatcttcatggtctgcaccagtttctggttcaagttccctggcaccagctccaagattgaacacttcatctccatcctgggcaagtgtttcgactctccatggaccaccagggccctatccgaggtctccggggagaaccagaagggcccagcagccaccgaacgggctgcggccaccatagtggccatggcagggaccgggccggggaaggcaggggagggtgagaaggagaaagtgctggcggaaccggagaaggtggtgaccgagcctccagttgtcaccctgttggacaagaaggagggtgagcaagccaaagccctgtttgagaaggtgaagaagttccgcatgcacgtggaagagggcgacatcctgtacaccatgtacatccgacagacggtgctgaaagtgtgtaagttcctggccatcctggtctacaacctggtctatgtggagaagatcagtttcctggtggcctgtagggtggagacgtcagaggtcacgggctacgccagcttctgctgcaaccacaccaaggcccacctcttctccaagctggccttctgttacatctcctttgtgtgcatctacggacttacctgcatctacacgctctactggctcttccaccggcccctcaaggagtactccttccgttccgtgcgggaggagactggcatgggggacattcctgacgtcaagaatgacttcgccttcatgctgcacctcatcgatcagtacgactccctctactccaagcgcttcgccgtcttcctgtccgaggtcagcgaaagccgtctaaagcagctcaatctcaaccacgagtggacgcccgagaagcttcgacagaagctgcagcgcaatgccgcgggccggctggagctggccctctgcatgctgccgggtctgcccgacaccgtctttgagctcagtgaggtggagtcactcaggctggaggccatctgcgatatcaccttccccccggggctgtcacagctggtgcacttgcaggagctcagcttgctccactcgcccgccaggctacccttctccttgcaggtcttcctgcgggaccacctgaaggtgatgcgcgtcaaatgcgaggagctccgcgaggtgccgctttgggtgtttgggctgcggggcttggaggagctgcacctggaggggcttttcccccaggagctagctcgggcagccaccctggagagcctccgggagctgaagcagctcaaggtgttgtccctccggagcaacgccgggaaggtgccagccagtgtgaccgacgttgctggccacctgcagaggctcagcctgcacaacgatggggcccgtctggttgccctgaacagcctcaagaagctggcggcattgcgggagctggagctggtggcctgcgggctggagcgcatcccccatgcagtgttcagcctgggtgcgctgcaggaacttgacctcaaggacaaccacctgcgctccatcgaggaaatcctcagcttccagcactgccggaagctggtcacgctcaggctgtggcacaaccagatcgcctacgtccctgagcacgtgcggaagctcaggagcctggagcagctctacctcagctacaacaagctggagaccctgccctcccagctcggcctgtgctcaggcctccgtctgctggatgtgtcccacaatgggctacactccctgccacccgaggtgggcctcctgcagaacctacagcacctggccctctcctacaatgccctggaggccctgcccgaagagctcttcttctgccgcaagctgcggacgttgcttctgggcgacaaccagctgagccagctctcgccccacgtgggtgccctcagagccctcagccgcctggagctcaaaggcaaccgcttagaggcgctgccagaagaacttggcaactgtggggggctcaagaaggcggggctcctggtggaagacacgctttaccagggtctgccggcagaagtgcgggacaagatggaggaggaatgaagctggggtggggccgttttaggtagagccttaaaaatgcttctgccctggaatctcaaccattgtcttccaagataggaagccaagtgggtccaggccaggagatggggggggcgggggcagctgtgtcatctttctggggcccaggaggatctgggctggtttgtctggggagacagacaggatgttgtggagctggggtggaacctggtatggagggattaactcagtcatggcattctccgaccaaaaccacacctgtgtctctggcaggctggctggccttgctcccatccctagaactgctgcctctccctggatattccagctcaattagtgccacatatgggggaaacgacacatcccagtgggatttccaacactccccctccccatgcaacaaagcaacttacttctggagttctctcccaaggagaggacacagacacagttgtttgctgtgttatatgttagctccgaacaatggttctcatttggctaagcatcaaaatcacctagggagtcggtgcaaaacaaaatatcccagtcccctcccctgaaacactgactcaggaggtttggttgggggccaggagtctgttcctaaatattccaggtagttctggtgcaggtaagtggccctgagacagtatgttgggaaatgctgacgtaaaggtatcagggccgggcgctgtggctcatgactataatcccagctgtttgagaggccaatgcaggaggatggttgagctcaggagttcgagatcagcctgggtaacatagcgagaccccacctctgccaaaaaaaaaaaaaatagggtatccaaatatctagattctgatcccttttgaggtcctagaccctttgagaaactgatgaagccaggcacctccttcctcaggaaaatgctggtgtacaaatacacacaaagctcttcaggcagctgatagatttcccccagagagctattcaaggacttcctaaggtgggtggactgcagggttaggacacctgctatagaggtgacatttttccaaggacaagcagggactttggtcttgactgttctctgggtgcttaataaataatactaattatgcaagttctagttttgatctcttatgtgcactcctgtcattgtctaacaccgtccattagggccagacatagtggctcatgcttgtaatcccagcgctttgggaggctcaggtgggaggatcgcttgagctcaagagcttgagaccaaactgggcaacatagtgagatctcatctctacaaaaacatacaaaaaaaagttggccaggtgtgctgatgtgtgcctgaggtcccagctactaggcaagcagaggcaggaggattgcttgagcccaggacccaggaggttgaggctgcagtgagctgtgatcacaccactccactccagcctgagcaacagaacaagaccctgtttttctttcttttttttttttttgagacggagtctggctctgtcacccaggctggagtgcagtggcgcaatcttggctcactgcaacctccgcctcctgggttcaagcaattctctgcctcagcctcccaagtagctggaattacaggcgcctgccaccatgcccggctaattttcgtatttctagtagacacggggtttcaccatcttggccaggctggtcctctcctgacttcgtgatccatccgcctcggcctcccaaagtgctgggattacaggcgtgaaccaccatgcccgtaaccttttatttcatgtgaccaagtaacacccgtgtgccagaatcaaggatgagtctcatgttctcagagcagaggcacagaaggctgcctggaagacggaaaggtaaagacctcagctataactctacacttgtgtgtgctccacccacaaatcgtcaccagaggagttccgacaagccggtaactctcatcccaaagtgttccctcgttggaccagaagctggaagggcacttggcagagtctgcctggccctggccacctcccgggtgtccgcaaaatcagaacttccttctcgcatctaagagcagagggaagccgctcttggggggatccctgggttccagatgggacatttccccagcacccgtcggaccacttaaaggagtggtttaggctgccgggggcccaagcactggcacctaaccccagcgcccctcctcagataggaattctccacgtccaggcgctgggctcacgttccgggtgcgagagagataaggggggtgtcttgaggttctatgtgggtctggccaacaactctggccttgaccttggccccgtcgccgagggcaggggtcacaccgctgggttcccatggccgtcccctcccccctggcttcggccaactctgagcctgctggggctggcaagaagggaaagggctctcgacggagcctaattacggtgaggaggcggcaccccgctgccagcaggaggctaggaggtaattaagcacaagaggaatcctaataaagcaccatcagtgaggaaggcattccgaagggacgcccaagccgaccgtgaaaagcgaggaggctgaggctgcaccgccgtggagaccagggatcgactgccgctttgggaacgaggttccaggaatgcgcatgcgcaaaagccacgcgggcgaacacggcttcgcctcgctaagcatgcgcgccgttttccccgcccaccgtcctcagaagaatggtgtttcctcgcagcgcctctctcaggagcgatcgggaattggcgcatgcgcactacggtggtggtggcgacgaaggcgggggttgcacgttgcctgcctcgagctctaggtggcgtcatccttcgggctgagccgaagcacgcacgcgcggaggttcgcacgcggagaagggcgggtgcgcgccgcgggcatgcgcggtgcggggcgagacggcggctcgacggggtcatccgggcgcaggcgcagtgcggtgtttgtctgccggactgacgggcggccgggcggtgcgcggcggcggtggcggcggggaagatggcggcgtcctccctggaacagaagctgtcccgcctggaagcaaagctgaagcaggagaaccgggaggcccggcggaggatcgacctcaacctggatatcagcccccagcggcccaggcccagtaagcacggcggcgtgggggagggggcgggcgggcggggcggggcgcgcgccgcgggaggccccgcccccaccacaaggccccgcccccgcttccggggcgctcgctctcctctccgccccccccgctgcgggctcgcggggcgagggtcacggtgacccggggggcgtggagccggcgagctccggggggttcgcaccctcagggcttgggagcccagttcccggacccaggcgaggcccccagctgatgacccgcccccatcgccgtgatcctctgggtcgggcttccccgactccacgcgacagtgaccacatccaggtcgccccgaaaacacagacacgtccctgttgacctgatgctaccactctcgtcatctcagggactgtctggcgcccccctcccccggcctgggggcttgtcagccccgtgcagcgacgatctacgcacacgcgcacgcctggctcggggacacctgaggttacttgaccacatagagcccctccccatctcttctgacccgaggattctccctctcgctctccctgtgaccgtgtctgaggtggggggacgggagggggtcccttctccccctcttggcgacagtgaccatggcattgggctcagcagaccccctcccacatacaccaggccccgcaaatccctgtgaccagtttcactgccaccatcttggtgagcgtgtggtgtctgacctccagaaatgcacatcgacccccagccagcccggtgactttgtcacctgtgttcaagtgatggctccccttcccttcacacccacacccacctgacctggggacacctggggccagtgtgactctaggcctgctcccgccgcgccccagcatacatccacctgctttctgatcagtcccaccacctcggtacctacctccctgacaccttgtcatcctagatcagtacctctcgcttcacacacacctggcctgggaacactgaccatatctagtctcccggctttttccccaagatcctggtctctaaatcctctgggctggaggaaattagattttcaaaccctgtgaacaccacccctgacccatgatcctttttgtgtctttcttgacccagtaaaattctctcttgtctcctctgatgtgaccttcgtagtttatttagttctctctatggagtcattatggcaggcgagaaaggtacccccgtatctgggcaccccacccattccctggtcacccagcctgaccttcacagcctgacaccctcctgtccctccctctcctgacctgagtcagcgtgggttcctccttggggagtctcttgggggtccagagaaatcatggaggtggggattctggtgcaggacactgcctgagacaagaagcccagccaagacacgggtccctgctagcccctgggggccgccctccctggcccctgagtggatgagacagggttgagtccaggatcccgggtgccttcaggggtggccgttcccatgcagagctaggaggccggtggcaggcaggcccccgaggagtcccctccaggcgtctctgtctgtgtcaactccatcccatcctccccgccctccccatctctgtcggttcctagccatctctgcagttcggtgcctccccctcctcctcgtttatgatttgatttcttttcttttggacgaatcagtcgtttctgttgtgatttatcgtggtgttgtttttttcttccttttccccatccagttattgtgatcactctaagccctgctcctgccccgtcccaacgagcaggtaccagcctttttatcatcgctgcttggacatctgcaccattgacctaaccgctgccccggccgcagaatggcgtcccccagcccccatgctctgtgtgtgtccccatgtcccttcccctcactctcactttctctctcactccactcaagcagcggtcagcccagcccagcctcctctgcgtcctccctcctcctccccctcccttactcccagctccactttggactccctggaggaggaggtgggctcccccactgaatgggagtctgtggcctccgggggtggggggggtgcacgcctgtgtgtgtgtaactgagagaacgagaaagttgggcctggtgggtgggtggcctgtgcctatggatctctctcaacaactaggtgaacacatagcaccccccgggttccataccagccctgggcgccagggacacagcagtgaatagaacagatggagcccctctcctctgtagcggggggctgcaataggggggcccactggacaaggagcacattcccaccagagagaacattctagctgggtgagcggccctgcagggggccagcctgggggaacctctggagacggtgggaattgaacaaagcctctggggaggccaggcacggtggctcacacctgtgatcccaacactcggggaggttgaggctacagggagccatgatcacaccactgcaccccagcctgggtgacagcgagatcctgtctcaaaaatttaaaaactgggccaggcgcagtggctcatgcctgtaatttcagtactttgggaggccaaggagggtggatcacttgaggtcaggagttcgagaccagcctggccaacatggtgaaaccctgtctgcattaaaaatactagagattaggccaggcacagtgactcacacctgtaattccagcactttgggagaccgaggcgggtggctcacctgaggtcgggagttcgagaccaccctgaccaacatagagaaaccccgtctccactaaaaatacaaaattagccgggcatggtggcacatacctgtaatcccagctactcgggaggctgtaatcctagctactcgggaggctgaggcaggagaaccgcttgaacccgggaggcggagattgcagtgagctgagatcgcaccattgcacttcagcctgggcaacaagagcaaaactccatctcaaaaaaaaaaaaaacataaaagattaggtggaggttgcagtgagctgagatcgcgccactgcattccagcctgggcaacagagcaagactccgtctcaaaaaaaaaaaaaatttaaaaagcgtcttgaaggagttggggggggagagaagacagggccgccagggctctgagcgcagcgccagcctgtgtggggcatgcaggctgtgccccacgcctgtgttgggagagagagtagatggggtgcctggccctgtgagtggttgtgagtatgtgtgtccgagggcaagggggactctgtcccggctgcatgggtgttaggtccacggcatgccccgggtgtgtgttgtgcgtgcgtgcacttgcacggcatgtgcgtgcatgttgacatggcagccggtgcacctgtggctcctgtcggcagacacgtgccctccagcctctcgctctctctcatccgttctctttctcatcctcaccctcttgctctcactccaccctcctgagctgccatgtggccatcaccacctctgtggcctctgttctcagggcctttgtgtacctccttcccccagtgcctacctgaaccctcccttccatccccccatgctccagtctgtggtccggcagcctcctccccaggctccggggccaccctcggaaggcctggtgggctctgtcagggaaggggcccacaggactcctcgagggctgtggtcgtcaaccgctgagtgcagggtgtgagcgggactcggatactctctgagggcgggaactaggcagtgtctcaagagatgccaggtgcacaggggttgggggctgggttggggggagcacaggccctcgggagccagaaggggactggggctgtggctcaggccatggacagagcagaggcgcagggacctgaagaagcagagggagaagcctggccaacatagcgagaccccatctctactcaaaagacaaaaattagctgggtgtggtggcgtgtacctataatcccagctactcaggaggctgaggcaggagaatcacttgaacctgggagggggatgttgcagtgagttgagatcacgccactgcactccagcctgggtgacagagcgagaacctatctcaaaaaaaaaaaaaaacagtgggaggtgacgtggtgctgcagaggcggcagtggccaggacagcgggaggggcacgggaggtgaggcctctaggccagtcatgaacgctgggcctggctgtgtcccaaggtccccagagcccttcccctgctcctgcctggtcctccaggaggggagctagggggcacagctcctgcaggggctggcaggaccagataggggcaatgctgggcctcctgcattgggactgaggcgtcttcctgcccctcctactggctgagatcagggtcctgggcacacgggagggacggggtttagctgccagcatggagcgggtttgtctgttcatattagtccctgggcaccagtcaccaggagcctgcagaactgtggggagaaaaggtggacgaggcaggaggaaaagaggggagaggggcttgttggctgagggctttggagagcggcaggccccagctcctgtgggaggggcaccttggtaggtgtgtgtagccgttgtcagggcctctaggatgtgacgtgtcaggattggctcctctggaggccacgttagcatcccggcctctgttcctgcaccctgttgccagcccagccagggagaccctagctcctccgggaagctgccctcctgtcccaggcccctctctggcctgtctctgcagcgcctcctctgggcacctgggccctagtcttggttcctgtctgtctgtctgtctcctgccctcccacccctaatgccgcctgcccaccccagggtgcctgctgcctgcccgccgcctgcccacccgctgtagcatgcccgagctgcccgcatgcaggctgctggatgagccaacccccgcctggcccagcattggccccacctggtcccgccagcccctgcaggagctgtgcccccgagctctcctcccagaggatgcaggccccctgaggtcctgtcctgcccccatgggccccagctctgcaggccaggccaggaggccctcatgtcagcccactggcccgaggggggccctccctgaccccggaacagaagatagggcaaggcagcctgaagcctgggtctcgtgcccgctgcctccccagcgtggccctgctcgctcttgtctgggagccaacttcagtgctaccagcagagccacagcctgggccagccctggcaggcactccgccctggcctatccatcctgtgggtgctgtggccctgggcctgcttcctgggcagaagtgggaggaagtgcacacacctgtcagggaggccccctggccgagggacacctcaggtccccatctcgtttctccgtcagcgtagacttggggctccctctcccctgctagcctcctccatctctttccaggtcaggggatgagacaagggaccctgagaacagtctggggtgggagggagaccccagctcctccagcccagcagggcagggggctgtgccagcctagctcgggaaacccaggaggggaaggtgagggtcccgacccctccctggagtgccagatgtggagctgacaccagctgggcgctgacccccctccctgccactggttctcacccccctagccctgcagctcccgctggccaacgatgggggcagccgctcgccatcctcagagagctccccgcagcaccccacgccccccgcccggccccgccacatgctggggctcccgtcaaccctgttcacaccccgcagcatggagaggtgagccaggggcccagcagggttgggtgggaagcagcattgaggggccaccgtgccagccctgggaggagggtggttaaaccggtgggaaccccggtatgggggactggggtggccaacctaaggtcaggacccacctccaccggcacctgctccatgtccccagcattgagattgaccagaagctgcaggagatcatgaagcagacgggctacctgaccatcgggggccaggtaccaccttcactgtggcggggagagggaggaggcccagccaggctggacccatcctgggagcgccagtggggggcagggggcggtggcagaggccccagggaccctccaaccctccctctcctcccagcgctaccaggcagaaatcaacgacctggagaacttgggcgagatgggcagcggcacctgcggccaggtgtggaagatgcgcttccggaagaccggccacgtcattgccgttaaggtgagccttggcggctaccccggctgcgccccacaccccaggccggtgctgaggctccctcctgtccctgcctgtgcagcaaatgcggcgctccgggaacaaggaggagaacaagcgcatcctcatggacctggatgtggtgctgaagagccacgactgcccctacatcgtgcagtgctttgggacgttcatcaccaacgtgagtacctggccgcgccctgcagcgtctcctcctccctcacccctgccccttcctagggagcagagcctctggggggtgggccggaagacacagctcccccgggtgcccctctccctgcagacggacgtcttcatcgccatggagctcatgggcacctgcgctgagaagctcaagaagcggatgcagggccccatccccgagcgcattctgggcaagatgacagtggcggtgagtgaccaggcggggcttgcactgggcaggatgacagaggcggtgagtgaccaggcggggcgtgcactgggcaagatgacagtggcggtgagtggccaggtggggcgtgcaccgggcaggtggccttgggtctgtgccccctgccacatgcacccccctctgcgtgcctgcagattgtgaaggcgctgtactacctgaaggagaagcacggtgtcatccaccgcgacgtcaagccctccaacatcctgctggacgagcggggccagatcaagctctgcgacttcggcatcagcggccgcctggtggactccaaagccaagacgcggagcgccggctgtgccgcctacatggcagtgagtgggggccccccagcgggggagggggtgggggctgggaggccggccccagccttggagatacgtcttctcctcccccccctgcagcccgagcgcattgaccccccagaccccaccaagccggactatgacatccgggccgacgtatggagcctgggcatctcgttggtgagttggggccctcccctgttctccagccaggagtgagggcttctgggggactcggagggaggagaacataaacctgtccagccctgcccgtctccctcccaggtggagctggcaacaggacagtttccctacaagaactgcaagacggactttgaggtcctcaccaaagtcctacaggaagagcccccgcttctgcccggacacatgggcttctcgggggacttccagtccttcgtcaaagactggtgagaacctccctccacttgggaggtcagggacagcccgctgctctgggcagctggggaggcaatggcaggaggggaatggaggccgcaccctgggatgggcggatgcgactgtgggcgggctcctggctggcggctgccacaggagctggagctggtgcccagggagccatgagctgggtttggacctagcctgaggggacagccagccctgtggcatttggcggggtggctgttggagattgtgagcacgcttctgcaacaagcacagctacaagttcaggagggccatgttcgattctctcaggggagccccacccacctttctgggggacctcagccagctctggccccccaagccaggcccttgccacctggccctaggccaggaggctccgggactcacagttgctccccgctgtcagccggggtcctgaggacatccacagctccttcccccacacacatcttggggacccctggccccttggggagggcctgagcacaggggtggggccggcatcccctcctccctcgttctcacatctgtcttcccttctcttgctctagccttactaaagatcacaggaagagaccaaagtataataagctacttgtgagtacctgagccctcccagtccccgtcctgtccctgcggaggcgcgaggccaggagggaagaccgtctcctcctaagccccaccccctcgggcccacaggaacacagcttcatcaagcgctacgagacgctggaggtggacgtggcgtcctggttcaaggatgtcatggcgaagactgagtcaccgcggactagcggcgtcctgagccagccccacctgcccttcttcaggtagctgcttggcggcggccagccccacagggggccaggggcatggccacaggcccccctccccacttggccacccagctgcctgccaggggagacctgggacctggacggccacctaggactgaggacagagagtggggggtgcccacccaccccccccgccccgggcctaccaagcccccgcccttcccaccccggggtcagccggccgtgtgcgtcccccgacagacactgtgaacggaagacagcaggccgcgatcagagtcgctgttcattcagccgcagcctctgggccggggcggcccccaggggccaggagagagccctggagtcccgcagccaccatgcacgctcccagcgtgctgtgtccttcgccactcccacgcgcccgttcctcttccgtcgccctctgtcccctgctctacctctctgtccttgtctggctctcccgtcaccctccctgcctctgtctctcttctggcctgagcctgggcccagccacctcctgacgggtcccctgggtctgcataggtctcccatggcgcaatgagtcagtggcccccagccaggcagtgtgggcattgccactgcggctggacggggctgcgcgctcgcgctctctctctctctctctctctctctttgatctcagggggtcctttttggagtttattgtattttattgtacttggtggggtgtttggggtgggggcggaggagagcttgttctcgtggggttgtcggtaccttcagaaacttttaccaaagtcacgattagctgcttgtggtggggccccaaccgccctcgggcactggggagctgggctggggctgctgctctggggtctccgggggccacagcttggggtgagttgaagacctcaggggatgtggaggggtctgcggggccctggccgcacaggatggccttcagggaaggtggtcttggggcatggtgcagagcaggtgaccggagggaatcggtgacggagcggggccaagggaggggtccggagggagtcagggatggagggcagagggagtggatgtgggggtttgaggacgtgtgacaagctccagcaggggtgggggccgggctgagggtgggggtgcgaggtggtcactcccatcgtgcccctggccgtccctccactcacccacacctggcccagtccacgttgaggtccaggactgggaaggaccgggtgagtgcaccggggacccaggccaggtgccccccggagcctgctggggtggccagagcaggagggggtgtgtttcctttttgtgggtgttgcatgcaaatcaagtggacaagaaaaaataacaaaacaaaaaacaagaaaaaaaaaacacaaaaccccgtaaaatcacaaagaaaatccaacaccaaaggcgcagaagccggctggccgtggtgggggcagcgtaggcgtagcatccctctcctctcacttagcctgttgactcttgttattatcatgatattcacaaaacgccgcatgtttaaaaagtcatagatgtcatcttctctctgcccccagggaggaaagccaccttctcttgccccttggcccctttgtcaggggccaggggtctgccgggtgggggtgccaacaggcctggccctttcctcccctgcatccagccatgggggcctctgcgattgccggaaggttgcatggctggtcccagggccagcacaggcccgaggccgggctgcctggttttatttttatttaactttattttctgttttatgagtgtgtgtccgcccacccccacccccttcagtgttaagtggggagccctgggggagtctctcctgcctcccagcctctcccaagacctcccccctcgtcaccagccatccctctggaccaggcagagggcggaccgggtgggcaggggcctgagggtggctcgggccagcccaccagccaatggacccctcctcaggccgccagtgtcgccctgcccctttttaaaacaaaatgccctcgtttgtaaacccttagacgcttgagaataaaccccttccttttcttccaccgagtctgtggtgtgtcatgggcctggcagggcgaggtgggaagggggtggttgcggggggaggtttctgcattgaggggagactgaggcaggtttgggagctagacgggaggtgtttgtagtgacttgccgatgggtatcaagcagctggtgtaagggaccccctgcccccagtggccacaggtcgggcagcagaggatcccttaatcccctcaggccttgggcattggctctggtgtcagcccctcagtctgccacccccgctccctgcctccctccttgccaaggacagggccgcctgcccacgtgcgggacctgggtgcagcccagctggtgtctgctctggccccaaacactccgacctcagctggtccagcatgctgggcaccgtgctgctgctggccctgctcccagggatcaccaccttacccagcgggccacctggtatgtatgggcagggaggtgacgggtctgtcatgcttctatccctgtttcaccctctttattttttttgagatggagtcttgctctgccacgcaggctggagtgcagtggcgcaatctccactcaccgcaacctccgcctccccggttcaagtgattctcctgcctcagcctcctgagtagctgggactacaggcacgcaccaccacgcctggctaattgttgtatttttagtagagacagcgtttccccatgttggccaggctggtctcgaactcctgacctcaggcgatccgcccgcctcgaacttttcaaagtgctgggattacaggtgtgagccaccgcgccccaccgatgtcactctctttcaactagacctttggtggtggtcctcatgggggtggggacagggcaggggagtggggtggggtctctgtcccccatcccaagggtggctcacatccccacttcggcaaagctccctgcagccacggagagggccagagttgtgggagggggccagtctacccaggtgctcttcagaagtgggtgtggtgtgcggatggacaagggggctcatgcctgtaatcccagcacttaagagaggctgaggtgagaggatcgcttgaagccaggagttccagaccagcctgggcaacatagaccccgtatggccgtggtagcgagtggctgtggtcatagctactcgagaggctgaagcaggaggatggctggagcccaggaggtggaggctgcagtgagctgtattcgcaccactgcactccagcctgggcgacagagggagaccctgtctcagaaaacaagaaaaatggatgtgcaggcaatctttcgtatttggagattagccgttttaccaggaccccgctcagcacctgaaggcagacatcagcgtgtgtttaggggcacgaagaggggaggggtcccatggctgcctcagcctggacaagtggaagcgtctcagatcttggtggcctggctgggctttggctgtgcccaggagagcctcttgggagggtatcctcttcacttcccttcctcgttggtgacagcacctatctccccttagaaaggggagccgcctgtcctgctgcgtccccaagagcagccctggggaaggtgggggagctctgacttcacccagccggaccccaccatcgggtgctcctcaccgcttctcttccgccccagggagggcttcgccagcttcggaggcttctctaggggcgcatggctctgcaaccggctcagttgctgggctgtgcgagtcccaggggtcgccagggggcacatcaccgtcaggggggaaagtggcgcggagcccatcatgggtgaatcggccgccgcaaccgcatcccttttccaaaggcggcggcgggggcgaggtggtcgggtcacttttcccggaggcctaaagggcagcgcgcgttttctctcctttgggccgcccttccccgccccgccagctcccccgttccccgcggcgcccggcccctggctgcgcagacccctcttcagcctgaagctgtccgacacagaggacgtctttcctcgccgcgcggggccgctcgaggtcccggccgacagccgcgtgttcgtgcaggtggggaccccggggacaccaggggcggatgggggccggtggggacgggcgatccctgatggcgcctccgtcccccaggcggccttggcccgtccctccccgcgctggggcctggccctgcaccgctgctcagtgacgccgtcctcacgcccggccccggggcccgccctggctctgctgcgtgagggctgccccgccgacacctctgtcgccttcccgccaccgccgccgccgagcccgggtgccgcccgccccgcgcgtttcagcttccgcctgcgcccggtcttcaacgcctcggtgcagttcctgcactgccagctgagccgctgccgccgcctccggggagtccgccgggcgcctgcgcctctgacgccgccgccgccgccgccgccatcgcgggtgcgcgggcgcagagcctggaatccgggcgctggggcccttcgggggctgggcacgggcgactctggcagtggaaagaggatactctcggggtctgaggatctgggggttgggggaggtggggcgcaagggtccatctctgccgacagagtttctccggggacagtgtggacactgggttcccccatggacagctctggaatccttcagggctgggggttggatgcagaaggccactaaggggacacatttctgggaacctggtgctgggcctcacatgctaggtgctgggagacgcggaccatgcgatcttgtggggctgggatttggggtccttaggggctgggcggctagccacttgtatgcgtaggggctgggctcagggcaccctaaggggccggatttccaggggtcccatcttggctgtggtggagagctggactcaggtctctcttgggggccctggggaccagagccacgatcccggtgccctgatgtccccgtctcttccccaccttcctctcccccagtgtctgcctcaggacgaggcgtgcgccgacactggcagtggcagcgccgagggcctggctgctgacggcccccacctgcacacgctgacgcagcctatcgtggtcaccgtgccgcggccgccccccagtgagcacgcagtcctcctccgcatggggccgtggggcggcagagcgggtgggaaggacgcctgggagctggacccagtctcagcgtggcacttcccacagggccgcccaagagtgtccccggccgtgcagtgcgccctgagcctcccgcgccggcccccgcggccctggaacccgcgccggtggtggcgctggtgttggcagccttcgtgctgggcgccgcgctggccgccgggctgggtctcgtctgtgcgcactcaggtaccgacgacctccgccaagccgggcccccagtctaatcccgcgcgtcgggacccggggcggccgcgatcccgcctgcggggcctgatcaaccctagctaggcctgcctccgcgatgcccgcagcagcccccaggggccgcccttagcctggcgtggcgcgcagcagcccttctgcagctcgcctctcccttccagcgccccacgcccctggcccgcccgcgagagcctcgcccagcggtccccagcccaggaggtcccagtgaggaaggtaggtatggaggtggagggagctgggtgaggtaggagatctgacagtgacgcttcctagcgcttagttcgtgccaggcactgtggtttttttgtttgtttgtttgtttgtttgtttgttttttgagacggagtttcgctcttgttgcccaggcgggagtgcaatggcgcgatctcggctcaccgcaacctctgcctcccgggttcaagcgattctcctacctcagcctcctgagtagctgggattacaggcatgcgccaccacacccggctaattttgtatttttagtagagacggggtttctccatgttggtcaggctggtctcgcacacccgacctcaggtgatcctaccgcttcggtctcccaaagtgctgagattacaggcgtgagccactgcgcccagcctccaggcactgttgtaaatgttttacgcctatgaactaacttaatccccttaacctctaggcggacactattataatccccattttagagacgagaatgatgaggcattctctgaattaagtaacttgtcaaaagtcacaatactgggtggagcttggattcgaactcaggcagtgggtcacccgcggcaggcgcgggctttgggtcgagccaggggcattaggtgaggagaggcactaggcgaggagaactcagcattcggacccggctcccactctcaccccggcatgcagaccgatggaagaggctagtggtctgctgggaagggaggtggcccgcgtagcgtcccctccctcgctgagcctcagccacccctcccagggatggtgcgcccccaacatggtccggagatacacccagctaccaattcgggaccaggaccaacaggaccggacccgcctccctggacctcggacctgatgaggccacgacccctgcgcttctctcctccccctgtccctcccacctgtgctcaaaataaacctctggactgaccggctaagttctggtgcagtcagtgagcgcgcaacgtgcggggtgggggataggtggggaggcttggggagaaagctgggagcaggacttggggggtattcctgagaaatcgtgacttacaggggtggagcctggggacggggcccatatgcccatatacccgtgtgcactcccaggccatgggagactgtagggcgttttgtctcaaacagaaagcgacacccggccgggcgcggtggctcccgcctgtaatcccagcacattgggaggccgaggtgggtggatcacttgaggtcaggagttccagaccagcgtggccgacatggtgaaaccccgtccctactaaaaaaagtaacaaaaaaagaattagcagggcgtagtggcgcgtgcttataatcccagctgctggggaggctgaggcaggagaatcgcttgaacccaggaggcagaggttgcagtgagccgagatcgcgccattgcactgcagcctgggcaacaagagcaaaaatctgtctaaaaaaaaaaaaaaagcggcacccaaccccacaagcgtaagtttaaaataaaccttccccctccctcctctccttacccggacacctgcccatctgcctcctgcgatctttctcaagccaggccttctccgctctccattacccccgcccggaccctgccctagctccgcttcgaccttctgcctctgctccagttccctcctggtctggacttcgccctcctcttagattgtcagtctagtctagagctccttaaatccctcctgcccgagctccactctaccttacacagacaagagtgggactatcagccccagtctacagaggaggaaactgaggctcggcaaggctaaatcacttgcccaaagtccccaggcctgtctgaccccagagcccaggctcttgaccgactggatcttcggacttgacctttcggccagaacccacccctctgcgagaagcaaagcacacagtagtagcttcatgagttagtccagcaacagagggagggcatgggatccaaggtgtcgtctccacttcatgaatgagataaagtgcaggctgagggtctccttcgccccgccccagttccggtgccgatctccccttcacttccattggggcggttccccgggcctccaaacgcgaagccacgcccccacgcgcgtccgcctccgcgcggttctttctgacctcggcggcccccgtagctccgcccatcggagaagcgaccttacagcgcctgcctctttctgagcggcatgaagccacctcccaggcggcgagcggccccggcgcgctatctgggcgaggtgaccggtcccgcgacctggagcgctcgcgagaagcggcagctagtgcgactcctgcaggcgcggcagggccagccggagccggacgccaccgagctggcccgggagctgcggggccggagcgaggctgaggtgagatgcggttctcgggaccggagccaggctggaggcggggctggggtggggcggagagtgggcggggctgcggcaggagccagcggggcggggccaggaatgtaagcgagcgggggcgtggcgtggggctgagtggcggggcgttagtgggtgagcctgggcggggtgaggggcggggcgtggacgggaagagaagacctaggggcggggcgagcttgggagctagacgtgggcggggcataagtgaagcggaggggcggggcgatgccgggggcggggcgtgcgtgccgctgaggtttggagagtgggtgggtgagtttgaggggcaggacgagcctgggggcggggcgtgggcgggttaatagcaagacttaagggcggggccgttttgggagtaaggcgtgggaggggcgtgggcgggatgagggcaagctttaaaggcggggcgagcctcggggtaatgcgtgggtgaggcgagggctaaacgggcggaatgaactgggagtaagatgctgccgagtccgggcgaaaagcaacgcatgctgttggacaggatacgagcttgaagtgagagggaatagagaagaggggacgaagaagggagttgaacggggtagtagtcagcatagggttgggccctggctgcgtgaaggagccggaactggcctgggccttacaacttccttaggtagctggtcacgctctgggtggggtaggggccttggcagtcactgggactcctaacaccgggccagcaggagactaaggcgcagtagcggggcccagagcatacaagggattgggctttggcttctctgctgcagccctgagctcatagaagcctcattccgccgcctctttcctttctagatccgggtcttcctccagcagctcaagggccgcgtagcccgggaggccattcagaaagtgcatccgggtggccttcagggaccaaggcgccgggaggcacagcccccagcccccatagaggtgaggcagatgaacagggtgaggctgtccagggcaggtccctggtgggtaggtgggagttgcgggggataacctgattaggggatccccaggaggagcagggcttggggggccattgcaggctgatccctgggctgaccctgtacctctggcttcactcaggtctggacggatctggctgagaagataacagggccactggaagaagccctggcagtggctttctcgcaggtaccgccattcccccaggcaggtcagggtgtcccagaggacagggtcacatgggccaaatcatgtgaacctgggtcctgggcccttttgccagctctgtggactccgtcagtcactggacacctcgagcctcagtgtccctggctctgaggccatctcttgtctgaggagcatcttagggtggcagggaggatgggggaatgtgtagacggtgagaagacttcccagctcctcttcctccctgattgttctgcctgccaggtgctcaccatcgcggccacggaaccggtcaccctcctgcactccaagccccccaagcccacgcaggcccgtggaaagcctttgctcctgagcgcccctggaggacaggaagaccccgcccctgaaatacctagctctgcccctgctgcacctagctccgcacccaggactcctgaccctgcccctgagaaaccttctgagtcgtcggctggtccctccactgaagaagactttgctgtggactttgagaagatctacaagtacttgtcctctgtctcccgaagtggccgcagccccgagctctcagcagctggtgagaagggtgagggagggggcaggagcagagggatcaagggtccctggcagcaggcaggggtgtccccttacccctctcctccatccatcactagagtccgctgtggtcctcgacctgctcatgtcacttccagaggagctgccactcctgccctgcacagccctggttgagcatatgacggagacgtacctacgcctgacagccccccagcccattcccgctggagggagcctggggcctgcagcagaaggggatggggctggctccaaggcaccagaggagacccccccagccaccgagaaggccgagcacagcgaactgaaatcgccttggcaagcagctgggatctgtcccctgaacccgttcctggtgcccctggagcttctgggtcgggcagccacccctgccaggtgaggggcatggcgggcaggaggccacaccaggccccccgccctgcccctcggttctgctcggctggccctggctctttctgaggatcccgtcatgggggaaggtccttgagatgatgctcagctgtggggcgggcctctaagatgccccatactttgggggtctcagaaatggaacccccgttgtacaggggttgggtgggggttgcaggactccactcacaagcctcctgatgtcaaggacaggcggacagggctggcctcccccagtccccaagccccactgtgccttgttgtctgctggggggccatagctggcactgcccaccgtaaaggccctcgcacattttcccccttcctgtacacctcggggccagcatcctcaccttcttcaactgaccagtcgtggttactccctgctgccaggtccttccccttcccgggggtattctgtgaccatgaataaagttatcattctctttctctttcacctgtgacttaaagatggaagtgggggccctgaagtgtcagagcttgggggtcacagggctgggggtgtgtgccagggaggagagctgccacctgactggtgtgatgaggcctggggtgaggagccccttggtgactgtgaagctgacaagtgtggatggggagagccggcagggcaccttggggacaggcgtcagggatgggtttcagagtagggcaaaatcacatcgcacaggtggaggggagaaggcagcagagagtgggggtgacccggtggaaggagttgagccccaggctgggcggttagaggaagatagataggggtgggctgccccgagtggcaggaggctagtgggagtggagtgtcccctggggtggctttgggacctcaaggatccctagaaggcggggagggaggggtactggagtcagggctgaccccaaacccctgggggtgctgggaccccgcttgaggccccctccatcagcttcacctgccctgtgggtgtggaccgagggtcgggtcctagagagggaagcagatgtcctcccacggcaccgcgtcccacgcccagctagtaatccaagtcggtaaattctccgttctcggagcctgtgcattcacccagcctgccttttatagaaacgctcattcctccccccacacactgcacacggctcccctggggtgcacatctcttgggagggccttggagcacagccagcccactccgtccgtggtcaccgccccaccgcaccagacccacaaacgctgccaatggtggtgggcagggggaggaggcttaggctgcaggtacggtcggtcgtcggagcctccctccagggctggcagagggtgcgcctcccagttccccacagggctgagtctctctcaccacccccggcgcctccccagatcaacagaattgtgtgtggaggggaggcagctgggggttacacatcagcccccccccccaaagccggtgaaaggtgcttgtgatcttggtgtctttgcagccctgggaagctttaaaaacatgcaaaagccagacctgggttccacttccagccctaccagactctagccatgtgactgtgggcaagtcagtcactggagctgcctggccctcggtctcctggcctgtagaatagggatgctaacagggcctggctcattctcacgatcccgaagaggagacaggctataaacaggaggtgccaactcagcacgctacttggcatgcagtaagcgctcaataatagcttttattatcatgttcggctcagaggcagggaggagtggaacggcatgggagggctgcgggaggcacggcaggggggtcaggggcaagtggcaggagggcggatggggggcagcggtgggcaccggggcagggcgcgctgacctgtcctggggcccgggttgggggcagaaatgagcctgcccacgctgtcccgccacggcaggcgccacgcatcctcgacacagccgccatggcaggccttcgggctccgtctccgggacaggcggtgcagggcaaattggtatgcagcgtccgccccgtgggcccgggagagcctgccccgcagggaccagagcccaaggacgggctcaacactcagtcaaggtggggttgacgacggccagacaacaggggagggaggagggacaagggggtccccacttccagggacgcacaatagcagagccacttacacgctggggagggggcggtgcgggggtcctcctcccgcccgggattcagagtcgggggtgggggccagccgggcgggtgagatgcgcagagaggaagggacagggcggataaaggcacgaggtggggctccggccaggccaggaagggacatgggaggggtctcgagggggaggggctgggcttctcccaactccctccccctctcccccgggctgggggctccggggcgggatcctgagcgcagtcctggccccgcggcgccccccgccgggccggccctctgagaccccggcgcagggccggctagggggcgccgcgcccctcacaccaacgcgtagtcgaactgcccgcgctcgagcgcctccttgtggtcggtccaggacgaggcgggcatgcggctgtaggggtcgagcaggatgcgcacgcagcgcaccatcaacagcaccagcaccacgagcaggcagagcacgaaggcgaacaccgtgcgctgctccgcgtccaggcccgcgcccaccgggggccccgtcgacggcggcaggggctccggcgacagcgtccacgtcgcgctcatggctcacatcgccgcgcgccctgcggaggaggggacccgccccgggcgccggggatgaggctgcgccctccctcccgcgcctcctccgcttcgccccctcctgccgccgccgccgccgcctcccttaacgtgcccgaccccatcccccgcccgcgcctcggtccccgggctacgcccatgcccggcccgccggatcgccgccaccaccacgcggggacccaactctggccgtgcgcgcaggtgggggcgctgagagccgggaaacggagccgcgcccggcctgggccgcacacaacaggtgcgaaagcgcggccgcggcccgggcgcgcggcgtggggacggtccccgcggcccctgcccccgctccctttgttctcggcggcctgggaccccctcccccaccgcccccgccccggcgcgcccctcaccctggcttcgacccggacggggaccgaccgcccggcggccgcgctctctcagggacccgcgccggctgcgcgttcggcctctccccggcggcggcggcggcggcccgggctccggctcagcccaccccacccgcccctggagcggcggagaccgaggcaggcaagcagcgcgcgagccgggccgccgcggctgttcctatggcgacgggggcggggccgccgcggggggcggggctgcagggggcggaggctgcgcagggagcggcgcgcgagccagcgaccccgcccgggcctgcgggaggacggaaccccagccccgaggacccgcgagcacccacgacctcgccggggagtgggcagctgccactcccacctcccctggcacttcgggccccccagcctgccctgtgcctgcattctcctccgcgatagaccccactcgagactccctgtttgtggggggacctcagtggccctaaaacactcatatgggcactcaagctcccccggccctggggacctcaattctcagagagctcaggcaggtcactgggatgagtaagtccccctagttttgtctgtcactggcctcgtcttccaactcagggtccagccctgggcaaggcgtccacccactgcggctgcagttcctcactcgaccttgaccgcctcccacagcagccgcctgctcccacccccaccatcgcctcggccactcccgcgccagagaagacacttcagactccgtagctgctcttctgcaattcggtgttttattctttccaaatctcaggcttatgcacaagatggaagagcactgttaaaattaaaaaatggacctaaagtggcttggctgacgtggctagcgggccactgagccgcgggtcccgggtcccaccctgctgtggggggagtccctgggccctggggcctcttggcactgtgtgacctgtgtgcaccccaggtgaccaggcgccgggacccctgcagggcagagcaacagggcaggggttggccctgcgggggagtgtctccagctgccgcgcacccgcaacagcccgttgtcccctcccgggccagctggtcttgcagccgtcctggcagagctgggggcagagcccgcagtcttgttcccagaggtctggagttgccgcaggtggtgttgcggtgcctctgtgcctgatgacccaggccggggctacctggctccggcaccacactcagagaatctgctcggtgctggaggccgagatgtccaggagccgccaggccgcgtaggggttgagctcgtcctggtctcggcagagcgcccacacgtacagcatccgcagcaccttgtcctgcagggtggggtgggaagggcactgttgagagggttgaggtgacccaggcagctctgggggggggccaggctctgtggggcaggagccaccggcaacttccccaggggctgggagcagaggccagcacaattgcctagactcaggaaccactcagccttggtaaaaacagacaggtctgctggtctccgacctccctcaaccccaaactctggcccagaggtttctccacatccccacccagtcccagagcttcagggctctgagctggggtctctgccaggtggccacacacagatcttggggacaggcggtgtcatgtgcctgccccatcccactccctcactcaccgggtcaccctccaccacctcgcctttggggttcctgaccaccatcaccagctgtgcctggaaggtgatgatcagcaccggcccctgctccatcatcttgcccatggccagctgcagaggggccgagaggggggatgtgcctcagaggacagcccggctgctcccctggaggtgaaacccctgcgcctaggccctgctaggagaaggctccagcaccaggcccagcaccggtccctccccgtgggccttgcctctcaggccaggaccaggcctccctcgagaccctccccttggacaagcccaagacctcttggatcagcccatggcccccagcccctggcaaggccacctcctgggccttgtctgggccatagttcccacccccgatggtggcccgggcccccactgcgaggtgcttacgtcgacgttgtcaatgtctaggatgcgagaatggaactggagacccagtgccttggcctgctggatggggtgggccagctggctgtaagtctgcaatgagaggccgacacgcctgcgtgatgccacccagggtgggcaccacgccacacagagctgctgcccacacaccctggcgcccaggtgccctgccgccagccagcaatggcagaggccaagaacccaggtccaagtggggaggcaggtgccacccacttactggcccagatcacacgcttcccactcctgggaacaacactctatccagatgacccaatgaaaacaggattaatcagcaaagtgggtgattctcttggaacaaaatcccaaatctactcccagggctaagctggcggccccttggctgatctttaatacttccatattcgccgcactctgaatcttggcctgagatcaaacgcctcttctaggatctgtcctcagcctgaggctgcctctgtcactgaccagcccccagtgtcaccctcaaccccctgcgcctgtgccaggcacaggaagcagcccccgagacacgttttcgctggaggtttctctgggcttggcatgaaaccatgagagaaaagatgttctgatagcatctactttttatggaaatgactgatccgcggaggggagagaaaaaaaaaacagagccaatcctacttgttcggtttcttaaaggtgacattttaaaaacacttctgtggacgtggctggaacttcagctgtgtttccagggcaccagcagctccctggcaaagcgagtcagctgtggcgtaatggtcccaaggtaaaaacaaaacaaaaaaccaaaaaaaaaaaaaaaaaaaaaaaaatccacatcgaaactcataaatgcctgctggattagtcaccatgcaggggagtatttaaaaagaaaatctgacatcttctcctctgctttttccaagttgtttatgagctgggtgcagaatagaattagccaagaacgattctggatcgcttaatacgaagaagccaggggaaagaaacacacaggtcggggagcgaatagggtgagatgaggtggcctgaggagatgagagctgggagccccacagggatggactcgggcagggacagggaggctgccagggatggggcagacagctagaccagaccccaggtacgcggtgctgctggtggcccccgaaccccaagctttgactctgagaagcagctgaggcctcatcaggacacagctccttcctggtgtgggaagactatcgatgttttgtttggatctatgtttcaggatcatgtcgtgaggacagctagaggctcccagggcctggggaggggcacccactgccgcaaccccatccgtgccccataggtggcggccccgggtcaccgatgaaagctcccccaactcttccaggggctgtttggttaccagggttacctctgtgggttccctctggcccggggccagcactgccctggtttctgtgatcacacttcattctcacgacccgtgggaggtgagcacagggactctgctctggcctgggaagtgggatgggtgacaccttcaaaccccacttgactcccagcccccccccagtcatgtgggagacccacactgtccctgacccccggccccagcctgcaccccaggccactgcagccacctgaaatagggcagtcggcccccagacacctcattttacttcatggctgcaaccacctctcctgggactctccttccctaaattattatttctttttttttaagacagtctcgctctgttgcccaggctggagtgcagtggtgcaatctcggctcactgcagcctccgcctcctgggttctagcgattctcctgcctcagcctcccgagtagctgggattacaggcgcccaccaccaggcctggctaatttttgtatttttagtagagacagggtttcaccatgttggccagactggtctcgaactcctgacctcaggtgatccgcccgcctcagcctcccaaggtgctgggatgacaggcgttagccaccgtgcccgacctatttccttagtgacagtgtcttgatctgtcacccaggctggagtgctgtgctgcgatgactcactgcagccttgacctcgtgagctcaagtgatcctcccacctcagcctccctaatagctgggacaacaggtgcctgcctccatgcttggctcttttttttttttttttttttttggagacagaatcttgctctgttgcccaggctgaagtgcagtggcgcgacctcagctcactgtaacctccacctcccggatttaagcaattctactgcctcagcctccccagtagctgggattacagacatgcaccagcatgcctggctaactttttattttagtagagatggggtttcaccatgttgcccaggctggtctcgaactcttgagctcaggcaatcgcctgccttggcatcccaaagtgctgggattacaggcatgagccaccgcaccctgccacttggctcattttaaatgtttttgtagagacgggatcttgctatgtttcccaggctagtcttgaatgcttgggctcaagcaatctcccgccttgggctgctgggattgaaagcataggccaccgtgcccagacctaaccaaaattattttaagattggagggaaaaaaaaggcccagtaaaattggcagctttgtgatctctcacaggcccaggggacacccccaaccagccatctcttagacaccagcccagagaaggattctccctaacaaagtttacagtctgggagcaaaggactggcgggtgacccggtgtccagcctgagagcccagatgtgtcacatgctgaggaatggaaaggggcagggggggatgtcaggctctcggagggtgagacgtgaggattcccccaccgggagcccaggtcctgcctgttgggagctaccccaacggagccaccgaagtggaacttctccatggtgattttttaggccttaaaaaaaaaaaaagaaaaagaaaggaagtactcacagcttcatagcaccagtctttgagaatgtcaagctctccagaaatcatggcctaaaaaggaagggaaaataagcaccagaacgagagtgggcttttcaggcagcaggcgaggtcctgggaacattctccagtggtgcggggtggggagtttcctcagacacccccggctgccacctgtggggcgcgggtggagctgtggcactgggtgtcccccccaggcccgtccctgctggtgtcagtgcctggctctggcctaggcacaggcggagggcggcctgcgggcgaccacccaggaggcaccccacagggggacccccctggaacctggtggaggaagagaaaggtggctggggacccagctttcagcctggtcaggaatccaagccagggagatgaggacccaactccggctcccgcagtgagcccatgtcctctgtccccccaggggaccacatttcggactgcaaggcccaccatgggaccggctgcctcctaactgctgggggcagcgagagggaggggtgggctgcagggggcgtgcctgggctgggagctgcttccacaggatcctggagcctgggccggatccgatgagggggagggaggtgcctggagcggggagaagagcgggaaggagccggatgctggtggtgaaagctgtgagcggcagggggcgggtggccagaacacttggcacccatcacccatcccggaaggcactgcggtgctcaggctgctgttttggggcatggcgcccatccgcaccacctcccagccctgcccgaagtggcgggaaggatacgggaaactggaggaggaagaggacgttgggcggaggccggcggggccaaggatggagagtcccatgaagggccttccagaggcctggcccgactgggccgaaggtgtccaggctcctcctgcatcctgggggctgcagagaggcagaggcagcagggaagacaagaggccaccaacctcagggagaggcttatagggggcaggctgcagcatgaccttgagcaagataccctcatctataagcccaacaagggtctggttgccagggacagcaccgtgagggaacctcacggctgcagctctgggtcagacgtggcctggggccagctctgatgtctgaagacagacgcccacttctcccaaggggtgaggggctccaggcacctgagacaatccctagcctccagcagctgctcccagcaacctcaaaggaacaacagcctcaggcaggaggagtgagggaaacagacctggaggtaccggaggtgccggtaaggcccaggaagggcttcgggcacagctcatggggcagctgcagccgggcaggagcccgtgtgcaaccagcctcctcagaaaacagcctcggcagcagagttccctggcagcacccagggtgccggctgcggcgggggaggtggtggagccaggacctgccgcctgggaggggtcctgggggtgtggcacccacctccaggacattggggatgatgtcgttctcgcactgtttcagaaaccggtccttgtcaaaggccgggtccacccggaggatctccgtgagcacctccgacatctctgtcttggagaacaggccccctgcagggagcagagccgggagttcggggggaaggccggggaccccgccccaccaccagcctgcgaggtccagggatgactcactcacccagcaagtcggtgaccttgtccgtaagggcccgggatgcccggatgaacgcgttgtcgctttcgtcatacttcatcttcatctcgaagaaccctgtggaagatggggtaggtgctggagaaggggccccttccagaaacacaaccctccctcacagcttctagaggctccctgtgacccctgcgggatccaccctgacacgggtggggtcagggaggggacggctgtggacctgcatcctcatctgtgcttggggaccgctgcctgcccacctacctggccaggcgcagaggcccctcagctgcggccctaatggggctgtgtaagttatgggccgccaccccactggctgttgctttcactacaaaggaaacacaggcctctagcagtcctcacaggacaagggacaggggcctgcggctcgtttcggggccctgactgtgcttatgagggagcacctggcttctggcggcagaatctacagccccaccatcatgtgaccgcaaagaagtgaccggcccactctgaccccgatctcctcctctgcaaaacggggctgtcttgtgcccaatgcagggggatcaccttgcggtccaccaactgcccgggacacagtcacctgccctccaagacaccttcactcacggttaaacaccacgttgttctccttgaagtccttccactgctggtaccacttggagtccttgtgcagcacgacccccagggcctccctggggaagagggtgggccctggggtgagcggcggcgccagggccaccctgtgccctcctgcggctgcaggcagggggcagtacaggacagcaggcagctgagacctcaaacctaggggctctgaggaccccgccctcacctctcaccctcaaattcgagggagccgggaaccttgggcagaaggcaaactcaagaaacggactcaggagggaaccattggtgggctcccgaaatggacagcagtgaaagctgcccaaaatgggggcagcgagggccacgggctggtacctactcgtttggctcaaacactttctcctccttgaacttatctcccgcaaactccgttctcttccggagtcgctggggcctccggtagggcccggtctgtcccaggacgctgtcgtcaatttccttcttcacggactccaccccctgcgagggaggcacagcggggctggggtgggtgtctgggttcggccgccccaggctgcatgccctagcccaggactgggctcacctgggagagggctctgaaggccgctgtcctgcccagcttctccccgcctttggataccgactcggccgactgcttggccgtcttggctgcttcctccacgccctccttgattttccggccgagatcacttttactgacttcgtgaaggctctactgagacagacacagagagggggcgttggcaccggccctggcggccggggggcggggcaggaggaatgaattcctgccggagagaagggcggatctggttccccgaggccggcagaggccttctgtgctcctgtggtacgcggcacccccagagccatgagcacaacggcacccccagagccacgagcacaccgccacccccagagccacgagcacaccggcacccccagagccatgagcacaccggcacccccagagccatgagcacaccgccacggcttccgggatgctggccctgggctctgggtgagacgctgggtctgctggcccctttccaaaatgggcaggagtcctctggagacccgggaactgcctggcagcaaggattcccaaggaggggaccccggggaaagaacggcggtgagggcgccccatgctgcgcaaagctggacagaacagacaaccgaggagagccgcagcaccccaggaatcctgcctcccgcctctaccctcgggagggggtggaagcggcccctctcctcctatttttaggcaggaaaaacattttcatgttctcctcgagtcctggctagcagcacttactgctgccgactccctgggtcaacggtcatgcaaggttgccagtctgacctcaccctgcatgtgccgggaactcctgaaaccttcccgagggtggcagcacgccccatgccacccactgctgccaagccacccccacccaggagccgactcttcctccagcctccagcggccaggggactttgatggccccagcggctccaggcgggcgtggaactgttacctccttcacggtgcccgtcagctccccaagcttcttccgtagcacctcgctcgtccgcacggtttctgactcgatggttttctaggtaaagagcgctgtgtccttttttttttttttttttttgagacaatgtctccgttgccgaggctggagtacagtggcacgctctcggctcactgcaacttcctcctgccagattcaagcgattttcctgccccagcctcccgagtagctgggactacagggcccaccaccatgcctggctaatttttgtattttcagtagagacagggttttaccacgttggccaggctggtctcaaacttctgacctcaagtgatccacccgcctcggcctcccaaagtgctgggattataggtgtgagccactgtgcctggccaaccgttgtgtctttaagtctgtatgttctgacacggcagtgacatttctcttacagccaaaggtccaagaagcatcttctccgcagcccctccctccccgcacctgccagcatgtgctgcctccagggcccccggctgcccacatggcttggattgagggtctcagcagcggtgagctccttgctcagaaggccggcagactcgggtccccgcttggcagctacctcctgagaacaggaggcccagccttcacctttcaccgggtggtaggaggtggccttgcctgtcatcactgtgcccctcatccagcctccagccaccacagcttggtcttatgtctcccgctccatccatcccactccaaactcagcctgctatgtcttcagatgacccctgcattaatgataaagaggggctgggcatgtgagctgtagtcccagctctttgggaagctgagatgggaggatcgcttgagcccagagagttcgagaccagcacaggcaacatggcgagaccctgtctctagaaatataaaaaaattagccaggcgtggtatcccatgcctttagtcacagctactcaggaggctgaggtgggagaatcacctgaacatgggaaggtcaaaactgcagtgagctgtgatcacaccactgcactccagccagggtgacagagcaagaccctgtctcaaaaaaccaaactaggctgggcacggtggctcatgcctgtaatcccagcactctgggaggccaaggcggatggatcacctgaggtcaggagttcaacaccagcctggccaaagtgatgaaaccccgtctccactaaaaatacaaaaattagcctggcgtggtggtgggcgcctataattccagctatttggaaggctgaggcaggagaatcgcttgaacccagggaggcggaggttgcagtgagccgagatcgcaccattgcactccagcctggctgacagagcaagactccatctcaaaggagaaaaacaaaaaacgaacaaacaaaaaaacacaaatgaaaccaaaccaaaccaaaatgcaagggacccgtggcaggtgcctgcatctctgaggctcagctgctcattggtaaaatggggacactgtaactgcctcgcagggcccttacaaataaaggaatgcagagccattcccagaagccagggcttggcagctgctcaagaagagaagtgacaattaataatgacaggctgggagcagtggctcacacctgtaatcccagcactttgggaagctgagacgggcagatcacttgaggccaggagtttgagaccagcctggccaacatggtgaaaccccgtctctataaaaagatatatagggctgggcgcactggctcacacctgtaatctcagcactttggaaggccaaggcaggtggatcatttgaggtcaggagttcaaggccagcctggccaacatggtgaaaccctgtctttactaaaaatacaaaaattagctgggcagtagtggtgtgtgtctgtaatcccagctactcgggaggctgaggcaggagaatcgcttgagcctaggaggcagaggttgtgttgagccaaaatcgtaccactgcactccagcctgggcaatggagtaagactctgcttcaaaaaacaacaacaacaacaacaacaaatcagctgggtgtggtggcgggcgcctgtaatcccagctatccgggaggctgaggcaggagaatcaggagctggaggttgcagtgagccaaggtcacgccactgcactccagcctggatgacagagcaagactccatctcataaaataaaataaaataaaataaaataccagcaccatcacccagtttccaccaggctccactcagagggctacagctgggagctctcaggagcgctgcatcccatagctggtgtgcatgcgttgcctgggggcctgtgaagatgcgggcgctggcctggcagtttgggagggtgtgagcctctgcactgctcatccactcccaggaggagccactgctgctggtctggggaccacgcttcaagctgcacagaacgctgcatggtctcatggcagaacccagaggcctggagacccgcacctgtcccctggctccctctcattagtgcatcagagcagtgacctcacttcctcacgagccaccctgcccccaaccgtccagccctgagctcctctggctgtccctggcctggagaaaccctggccctggaaacaaacatgtcaaccaagaaaggtaagaagcaaaggggcccaacgcggtggctcacgcctgtaatcccagcactttggaaggctgaggcgggcggatcacttgaggtcaggagttcgagaccagcctggccaacatggtgaaacctcttcactactaaaaatacaaaaattagctgggcgtggtggtgcgcgcctgtaagcccagctactcaggaggctgaggcaggggaatcacttgaacctgggaggtggaggttgcagtgagccgagatcgcaccactactctccagcctgggtgagggaaaaaaaagcagcaaagaaactcacgtatttccttctggcctcctggagcacgtctgattcttctagccttctggcctcgtcacggaatttttttatactttctttcatttctttgtttttggctaattcttgtttgacattatctagcaagccggacagaaagccttttctgtttccagaagaatatgatttggactagaaagaatgtacaagaaaaaaaatttaaagaacatagtagaacatagaatgaaatgccccacagagggactcagggatttttttaaatgttctcttttcggttgatatacatttaatgatgattagctatctcttttataataatcataaaaaacaaagaaacagcaggtgataaaagtgtggtatatccagacaacagaatattattcagtgctgaaaaaaaaatgagctctcagccactttaggaggctgaggagggaggattgcttgaggtcatgagttttaagaccaacctgggcaacacagcaccctatttaaaaaacaggctgggcgcggtggttcacgcctgtaatcccagtactttgggaggctgaggcgggcagatcacctgaggtcaggagttcgagaccagcctggccaaaatggtgaaacctcatctctactaaaaatgcaaaagttagctgcgcatggtggtgtgtgcctttagtcccagctcctcagaaggctgaggcacaagaattgcttgaacccaggaggaagaggctgcagtgagccaagattatgccacagcactccagtctgggtgacagagcgagactccatctcaaataaaataaaataaaataatttaaaaaacaagcaagaaatatgctctcaagctgtgaaaagacacagaggaaccttaaatgtatattgcactaagtgaaagaagccaatctgaaaaggctacatactgtctgattccaactatagaccgttctggaaaaggcaaaactaaggggacagtaaaagatcagtggttgccaggggtttggtaggaagagggtgagatgagtaggggggaacacagaaaaatgttagggcagtgaaactactcttatgatactgtaatcacagagaatgtacaccaccaagagggaaccggaaggtaaaccatgcatttattaataataatgtatcaacatcctgtcaattgtgacagatgctccacactaatgcaggacgtgaagaatagaaaactgtgtgccagatgggagaggaggggcatggcaactctttggacattctgttggatttttctgtaaacctaaaactgctcaaaagataaagccttgtgaaagcaaaacaaggccgggcgcagtggctcctgcctgtaatctcagcactttgggaggccaaggtgggtggatcacttgaggtcaggagttccagaccagcctgaccaacatagtgaaacccccgtctctactaaaaatacaaaaattagctgggcgtggtggtgggtgcctgtaatgccagctactcaggaggctgaggcaggagaatcacttgaacccaggagccggaggttgcagtgagccaagattgtgccactgcactccagcctgggtgatggaatgagactccatctcaaaaaaaaaaaaaaaaaagcaggctggacacagtggctcatatctgtaatcctagcactttgggagaccgaggtgggcggatcacttgaggccaggagtccgagacaagcctggccaacatggtgaaaccttgtctctactaaaaatacaaaaattagccaggtgtggcggcgcctgcctgtagtcccagctactgaggcagaggcaggagaactgcttgaactcgggaggtggaggttgcagtgagcggtatctcgcccctgcactccagcctgggcgacagagtgagactctgtttcaaaaaaacaacagagaaacagtttaatgaatgatcatacaataatccaatcaggcggaaggggccgcctgtggtcaacttttccacagctgtgttgggtataccagctccaggtgggatccccctccctggctcctgtcaagctacaagagaaagctgcatccagcctggtgctcaggccccgtggagtcacacacctgtggtcccagctactcagaaggctgaggtgggaggatcgcttaagcccaggagttcaaggctgcagtgagccgtgatagtgccactgcaccccagcctgggccacagagtgagaccctatcttaaaaaaaaaaaaaagcccagtgctgctccccaggacaggtggccaggcctcctgtcagcaggctgcagtcccattcagatgccaccctggccagcctttctccaggggaaacccaggttctaagtaaaatcatccaggaccacacaaccttatcgcagccctaccagagactcttgggctacaaaccatgggagtgagtgtgtggcgggggactagacaagaaagggaaagagtcacaggtcctgtcccacacccacgatggccccaggacaggactggagaggtaggtagctgcctccaaggaggcagctgagctgaggctctgggcgcagagagagagggagacagaatgtacgcgctgcccgaatgtacaggtctggggaagggagtcaggttttgggcttctgtcctcacgatgctgagacaccaacagaagcacagttgaagaggaatgaccaggagaaactgaggtctggttgtgacaaggtgactctgtaccaatgatcaaagggctatcttctagaaaaggaaacagctatgcttggtgaggtacccacgggcagaggtcacagggaagtagaattcagttcaatacaggggtctcttccaagcattagagccaacataaagggctattctgacagcaccttatccccttacgacatcaagcaagaggcaggtcaagtgtttctgggaccgagaaggccaggcacactgggatctgtcattctgaaagccccggacacagaaggcccaccaccgagatggtacgagccacctctacagccccacccctccctcctgccaatgggatctgaattttcgggcctcccctgtgtctgctggcccgagcatcctgagtcactcaccagtggcagctctccgcccggccggcgcatctgataggtcgacccatggggtaggttgtggctggaaagaaattggattccactgccgaggcatctctaattggggggagagaagagaaagatccattctaacaagaggttgactgagaagtaagcagaccacacacaaaacagcagggtcacctgcaactcactggccattttttttttttttttgagacggagtctcaggctagagtgcagtgctgcgatctcagctccctgcaacctatgcctcctgggttcaagcgattctcctgcctcagtctcccgagtagctggaattacaggtatgcgccatcacatccggctaatatttgtatttttaggagagaagcggttttgccatgttggccaggctggtctcgaactcctgacctcaggtgatccacccctcccccggttttccaaagtgctgggattacaggcatgagccactgcacctggcctcactggccaatttgtatcttatgcctgatgcatgccgggcactctgtaatcttcccaaagtctgagaagcaagcagaagctggtggaaagagaaaatgctgtgtctgtacctccagggcctacatctatcctcgtgcccctgaaactgggggaaaacggacaggtcccaggaaatgccaacccatggggggaagaaggctaaatgtacaatttaatcccttagtctgaaagtaggcactctaagcttctatgctagtggcaagcagtcttctcttgcgagcccaccccatttctgccagcctccaaagatgagagaactggatttttcagacacaaacatcgataatgtgttgccccagggacaactctggaataaacctacaatgtcctcctcaagggttgagctataaacagagtaatttaggggagtcgctctgggcaaagactgggctgatctcatgtaaaaggcacttgctggctgggcgcggtggctcacgccagtaatcccaacacgttgggaggctgaggtgggaggatcacccggtcaggagttcgagatcagcctggccaacatggtgaaatcccgtctctaccaaaaatacaaaaattagccgggcgtggtggcacacacctgtagtcccacacacctgtagtattgcttaaacccgggaggtggagggtgcagtgagccgagatcttgccttaagttctgtgcaggcactgagctggtggctcatgcctgtaatcccgatactttgggaggctgaggcggaaggatcgtttgagctcaggagtttgagaccagcctgggcaacatagctagaccctgcctccataaaaaattgggggaaaaaaaaaaagctctgtgcaggtcctgttcagctcggcaccctgtcacccagcacagaacctggcgtgttgatgtcaaaagaccaggtacaacttctccaccatttccacatttcctgggccgtttttctctctgttctctgcctcctacctctgagaaccctatgcaacatcccaaacttacacaggtgcctactatctcctgtatttacttgaggataacttttttttttttttttgagacggagtctccctctgttgcccaggctggagtaaagtggcaggatctcggctcactgcaatctccgcctgccgggttcaagtgattctcctgcctcagcctcccaagtagttgggattacaggagcgcgccaccatgcccggctaatttttttgtatttttagtacagatggggttttagtagagatgggatttcaccatgtgggccagtggatctcgaactcctgacctcaggtgatccacctgaggctgaggcaggagaatcgcttgaacccggaggcagaaggaggcagaagttgcagtgagccgagatcgcgccattgcactccagactgggcgacaagagcgaaactctgtctcaaaaaaaaaaaaaaaagagaaaaaagaaaaaacgaagagcacgagcaatatgaagtactactttctgagtgcgccttacacgtcttgactgccactgccctgtggacccaagagcctgctagggcgcgaaccacctctcgcacatccacaatgaacgttagaagaaacgagacaagaaatgctctcggtagagaacttggcatttaaccgcgagctgtgaatttcacgtttttttgccttcccctctacttttttccacgggacgccgccgccccggctaccattctctctcctgtatacgtggagtctgatcagagggcgaagggtgatcagctccctcccaggtcccgcgcatcgccgccccctgcccggtaagctcggtccccgccctcaggccacgctctgtgccccctgtcctggcctctgctacccaaagatctaaccccaagctttctaaggagcccaagcaagggtcgcgaaggccaagggtctgagaagaaagccttggtggccgaaggcccagaagacccctaagctcgccctgccagcgccgcaccgccgctcacccgtggacagcggcaccagccactccgcagggccgccgccgccatgttggagaatcgtgtgaccttctcgcggcgcggcccggttgcgtcatccgccgcttcggcctagagccgcgcaagcctgagaaaagccgctccaggagcggggtttcgggtagggagagccctccgattgggtccgtcatagggcggggcattaaaagggtagggaatgcctagagagcttgacctctgatagggcagtgttttggaaggacggggcccgtgactggatgtggcccgggggagggcactcctgggagggtcagatctgtgattgggcgcgactacgagggggcggagcccaggggcgtgtattccgtcacttgcggtgattcggctacagaacgcgccgggcgctggtggcaggtggtacaggcacgtggatccaccgaccacaaggacggattcgattggattctgattgaccggcggaccagctccagagtaattgtctatggctgcccctgcaatgactgattgattgacaatggctgagagaccagcaagtgagtcgctccgagaaagcgaaggagcccactcttgtgcggcgctttgggaagacgcctgttggttttgaccccgaataagaagaggaagctgagagcgggctgactgtggtccagtcctacttcgattcagtgtgaactgacactctgatctgaagacgctcaggcctttgtcatttcagcaccccagatgctattttccattcgaagaatgccgccaccaggtggcggtattttaacatggccatgcaatccgggtatgaggaggagggttggtcccctgggagagctaatgtatgttgctgttgctgtttgtcttattggatccttttttttttttatagagccagaggcttgctctgtcacccaggctagagtgcagtgtcgtaatctagctcactgcagcctccaattcccaagctcaagcgatcctcctgcctcagcctctgagtcactgggattacaggcgtgagctaccgcacccggtctttttgcattactaacctgtgatatgggtttatgggacttcattatttcaaagggaggcagcttggccccggagagcatgcattcctggcttctgcgatggatagacttgtgttctccatctcaggagctccccctcaaggtgggggtaagagatgagggcttccactctggctttgttcgagatgtcttgatgccaagaggagcaaactagttaagcggttggtgtacacaggtgtgttgctaagaataaggtctgggctagaaatatggattcttagttgtggttgaaagtacggagtttggccgggcgcggtggctcatgcctataatcccagcactttgggacactgaggcgggaggatctctccagcccaagagtttgagaccagcctgggcaacatagtgaagacctcttctttacaacaaatacaaaacattagcttggcgtggtagcatgtgcttgtagtcccagctactcaggaggctgagatgggaggatcgttgaggcccgggaagttaaggctgtagtgagccgtgatcgtgccactacactacactacactacactacactacctgggcaacagagagagaccttgtgtcaaaaaaaaagaagaagaaagaaagagagagagagaaaggaaagaaagaaaactacagcattggacactcagaggcagtgtgtcatataagcatgtcaaagacccaaagataaagtggagatagaagactcctttaagccaggatccgtggctcagtcctattatcccagcaactcaggagcctgaggcaggagcatcatttgagcccaggagttacagaccagtctgggcaacataacgagaccctatctctacaaaaataaaaaaataagccaagcatggtgtctctcgcctggaattccagctacttaggaggctgaggtgggaggatctcttgagcccattagttagaggctgcagtgagctatgatcacccactgcactccaccctgggtgacagcatgagacctccatctctttttttgttgttttgagacagagtctcactctgtcgcccaggctggagtgcagtggcacgatcttggctcactgcaagctccgcctcccaggttcacaccattctcctgccttagcctcccgagtagctgggactacatgtgcctgccaccacacccagctaattttttgtatttttagtagagacagggtttcaccatgttagccaggatggactcgatttcctgacctcgtgatccgcttgcctcggcctcccaaagtgctgggattacaggcgtgagccaccacacccggcctttttttttttgagatggagttttactcttgttgcgcaggctggagtgcaatggcgcgatcttggctcaccgcagcctctgcttcccaggttcaagtgattctcctgcctcagcctcccaagtagctgggattacaggcatgtgccaccacacccagctaattttgtgttcttagtagagacggggtttctccatattggtcaggctggtctcgaactcctgaacctcaggtgatcctcccacctcagcctcccaaaatgctgggattacaggcatgagccaccatgccccctcgagacctccatctctaaaaaacaattttttgttgttgtcgttgttttgagactgagtctcagtctgtcacccaggctggagtgcagtggcgtgatctcggctcactgcaagctccacctcccaggttcatggcattctcctgcctcagcctcccgagtagctgggactacaggcgcccgccaccatacccggataatttttgtatttttagtagagacggggtttcaccatcttggccgtgctagtctcgagtcctgacctcgtgatccacctgccttggcctcccaaattgctgggattacaggcgtgtgccactgcgctcagcactgtgggaggccgagatgggcaaatcatgaggtcaggggatcaagaccatcctggctaacatggtgaacccccatctctactaaaaatacaaaaaattagccgggcgtggtggcaagtgcctgtagtcccaactacttgggaagctgaggcaggagaatcgcttggacccaagaggtggaggttacagtgagctgagatcacaccactgcactccagcctgggcgacagagcaagactccatcaaaaaaaaaaaaaaaaaggaagacaatctggaggaacttggagaaggcagatggaaacagcagaggcgagtgctgcacagttcaggcaaggcaaggacagaaatgtagccaccgccattgcattttgcaatatggaggtcattggtgagataagcaagaggggttttgggtgagtggtgggcctgggagccagatttcagtgagtggagatggttttacagaggcatgctggggccagcttgcactgactcgcaagagccagccggcacatcttcaagaattcaaagcctcttgttaaacatggccaatatgtaaacaattaattgtataaacttaagatcaaatagattatattagaacaaaagtaataatgcaaaattcatcacttcctaattatgctgctacatgttactactatctgtgctcttgagggtttttgtttttgttttgagacagtctcactctatcgcccagataggagtgcagtggcaccagcacggctcactgtagcctcgaccttccaggctcaagtgatcctcccacctcagcctcccgagtagctgggactacagacatgcaccatcacgcccagctgatttttgtatttttttgtagagacagggtctctctacgttgcacgggctgatctcgaactcctgggctcaagcgatcctcccaccttgacctcccaaagtgctgggatgaccagcacaagccacagagcctggctactttttaaaattttttgtagagacaggctgggtgcagtggctcacacctataatcccagcactttgggaggccgaggtgggtggatcactttaggccaggagtttgagaccagcccagccaatatggtgaaaccccgtctctattaaaaatacaaaaattagccagatgtggtggtgcatgcctgtaatcccagctactcagaagggaggctgaggcagcagaattgcttgaacctgggaggcagaggttgcagtgagccaagattgcaccactgcattctagcctgagtgacacagcgagactctgtctcaaataagtaaataaataatctttttgtagagacagagtcttgctatgttgcctaggctggtctcaaacccctgggctcactcgatcctcccacctcggcctcccaaagtgctggggttacaggcatgagccactgcacctggcttatcttggggttatttacatatatgatgtctgcgtgctggaaatactatattatgtgagtcactgcattgtgtaccagttctgtttgatgatgccatctttgtagcttgaaatcacctacaagcagatcagccacaagtggtgggagtatttacaccacaggaattggcagacattccaagtcaggagctctttggttggtttgtttctctggtgagccagttattaaacatttcaccagcacagcggtggttgagaatactgggacacagaacacagactcttcccaggaatattcactgtgcacagaaggtgaaatgatggcagctggaagaacatatgggaaggagcgagagtgctttgttttccccaactttttattttgcaaaatttcaaagctacaaaaaaaaaattgcaagaatagtatacgaggctgggcacggtggctcacacctgtaatctctgcactttgggaggccgagatgggcggatcatctgtggtcaggagttcgagaccagtctagccaacatggtgaaactgcgtctctacaaacaaaacaaaacaaaacaaaaaaacaaaaacaaaaattagccgggcatggtggcgcacgtctgtaacccagccactcgggaggctgaggcagaagactcacttgagcccaggaggtggaggttgcagtgacccaggatcctgccactgctctccagcctgggtgacagagtgagactccatctcaaaaaaattttaaaaatattggctaggcgcagtggctcacgcctgtaatcccagcactttgggaggccgaggcgggcggatcacgaggtcaggagatcaagaccatcctggctaacacggtgaaaccccatctctactaaaaatacaaaaattagccaggcatggtggcaggcgcctgtggtcccagctactcgggaggctgaggcaggagaatggcgtgaacccgggaggcagagcttgcagtgagccaagatcgcgccactgcactccagcctgggcaacagagcaagactctgtctcagaaaaaaaaaaaaaaaaagatcaaatgtttagccaaccaaaattagtttaaattatacaacccgaccccagccaataaaaaagggtacaaaaacaaaacttgcatcaaaaataaaggctctcgtgcccctttgttcaagtatactcataacaactggccaaaaaaacacccccctgcacaaaaataaattactttgctaaaaattcttcgttcaagtgttcaatttccttaaaattttaagcgttattcctaacagtttgcactcctatgagaatctaatgccgctgctgatcttacaggaggctccagtgatggggagcggctgtaaatacagatgaagctttgctgcctgcctgctcactgcctgcctgctcacctcctgctctgcggcccagttcctaacaggccacagacaggtaccagtctatggcccagatgatgcagacccctgtcttaaacaaaaacaaaaaaccaaagcacacttaatgtgagatctactctcttagcaaaatttttgtttttgttgtcgttgacacggagcctcattctgttgcccaggctggagtgcagtggcgcgatctcggcttactgcaacctccttctcccgggttccagcgattctcctgcctcagcctcccgagtaactgggattataggcaaccaccaccacgcctggctaatttttgtatttttagtagagatggggtttccccatgttggtcaggctggtcttgaactcctgaccttgggtgatccacccacctcggcctcccaaagtgctggggttacaggcgtgagccaccgtgcccggctactgtgatgtgattattatacatcgtatgcctgtatcaacatatgtcctgtagaccataagtatatacacctactacgtacccactaaaattaaaaataggcagggcacggtggctcacacctgtaatcccagtactttgggaggattgcttgaacccaggagttcgagaatagcctgggcaacacagtgaaactccgtctctacaaaaaaaaaacacaaaaaaattagccaggtgtggtagagagtggctgttggtcccagctactcaggaggctgaggtgggaggattgcttgagcccaggagtgagaggctgcagtgattgcaccactgcactccaggtaactaaagtacaatggggccgggtgtggtggcccttgcctgtaatcccagcactttgggaggctaaggtgggtggatcgcttgacgtcaggagttcaaggccagcctggccaacatggttaaaacgtgtctctactaaaaatacaaaaattagccgggtgtggtggcgggtgtccgtagtcccagctactcgggaggctgagtcaggagaatcacttgaacctggaaagcggaggttgcagtaagcttagatcgcaccactgcactccagcctcagcaacagagagagactccgtctcaaaaaacaaaaatagaggccaggcacagtggctcacgcctgtaatcccagcacgttgggaggctgaggcgggtggatcaagaggtcaggagatcaagaccatcgtggctaacacggtgaaaccccgtctttactaaaaacacaaaaaattagctgggcgtagtggcgggcacctgtagtcccagctactcgggaggctgaggcaggagaatggcatgaacccgggaggcggagcttgcagtgagccaagatcgcaccactgcactccagcctgggtaacagagtgagactctgtctcaaataaaaataaataagtaaaataaaagtataaataaataaataaatacattacaatgaggttattagggtatgagccctaatccagaaaaaccggtgtccttataagaagcagagattgggccgggtgcggtggctcacgtctgcaatcccagcactttgggaggctgaggcgggcgtatcactgaggttgggagttcgagaccagcctgagcaacacggagaaaccctgtctctactaaaaatacaaaattagctgggcgtggtggctcacgcctgtaatcccagctactcaggagtctgaggcaggagaattgcttgaactcaggaggcggaggttgcagtgagctgagatcgtgccattgcactccagcctgggtaacaagaggaaaactccatctcaaaaacaaacaaaacaaacaaatgaacaaacgaagcagagatcagccgggtgcggtggctcaaacttgtaatcccagcactttgggaggctgaggtgggcggatcacaaggtcaggagtacaagaccagcctggccaacatagtgaaaccccatctctactaaaagtacaaaaattagccgggcgtggtggcgggcgcctgtagtcccagctattctggaggctgaggcaggagaatcacttgaacctgggatatgtaggttgcagtgagccaagatcacgccactgcactccagctcgggtgacagagtgagactttgtcccctctgcaaaaaaggaagtggagattaggacacagatacacacagagggatgactgtgggaagacacgagaagacggccatctgcaagccaaggagagaggcctcagaagaaagagaccctgctgtcaccttgatctcaaacttccagcctccaggactgtgaggcaatgcatttctactacttaagccacgcggtctgggtgctctgttacctgcaggccgagcaaaccaatgcaggtgcccctcagcctcttccctctggctcccagcccccacccactcgcattggctgttgcgtgcaggcctctgccatctgtctgccttctgtctggcttcctttccacttctgtaccttctacccagcggactcctccatctccggttctccttctcgaggtataattatagctgctggcactagtgcctgtctcctctgtgccaaagtgtgttcctggccatcagaggccgtatcttattaacaccaacccggtaaccctgggaggcaggagctatcattagctctcttataccaaagcgatgcagcacccaaggcttccagagaggaagggggatgcccagggccacgcagctagcatgtaaaagataatctgtcacctgggcatggtggcacatgcctgtggtcccagctactcaggaagctgaagtgggaggagtgattgagcccaggcgttcgaggctacagtgggctgtgattgcaccatcgcactccagcctaggcgacagagggagaccctgtctcaaaaattaaaatagaagcccggcacggtggctcacgcctgtaatcccagcactttgggaggccgaggcaggtggatcacgaggtcaggagttcaagagcagcctggccaagatggtgaaaccccgtctctactaaaaatacaaaaattagctgggcgtggtggtgggtgcctgtagtcccagctcctcaggaggctgaggcagagaattgcttgaacccaggtggcggaggttgcagtgagccgagtttgtgacactgcattccagcctgggcaacagagtgagactgcgtgtcaaaaaaaaaaaaaaaaaaaagaattaaaatacagtaataaaataaaataaatagcagggtgtggtggcatatacctgtagtcccacgtactcaggaggctgaggtaggaggatcgcttgagcccgggaagtcaaggctgcagtgagctatgatgctgtccactctagcctgggtgacacagtgtgagacactgtctctaaaaaaattcaaaacgggctgtggccaaggcatcatttcctcctgcctggattcccgactttccggaggcccttagccctaccggggcagttcgggcatctctcctgagaggtcccaggtccattacaggctatttccacggtctcgacatccccagctctttgacgctggccactggccggccacgggctgtgggttgggggatccgtggctttcgctgaggacccgcaggcctgtctccatgaggcttgacttgatagaaactggcactggggcctgtcctgtcatacctccccttgtcaactgccccttcctaggtgcacccttcccccaatctcttatcctaggttctgtcaactggaaaggagcctgattcagtggccttgcccaggcctgcttcctctcctcccaccatgcgctggctctctcagctgcaatttcctctccttacccatgccccactcactccacgggccctcggccagctgccattccattcctcctacctctcctcctccacctcctcctccctctccttctcctcctcccccttctctctctcctcctcctcttcctccctctcctcctcctctctcctattcttcctccctcacctccttccccctcctcctccccctcctctcctcctcctcctccccctcctccccctcctctcctcctcctccttctcctcctcttcctccctctcctccttccccctcctcctccccctccccctcctctcctccttctccccctccttcctctcatccccctcctccctctcctccttccccctcctcctccttctctcctccccctcccctctccttcctctcctccccctcctccccatcctcctcttcctcttcctccaccatcccccagcattaacatccctcactgtaagaaaaccaaacagacaaaatgccatccttgcaatgaaggtgaaaggccacggtctacaagaagtcctaagatgaactgaaaaattctgagcggagactcgattgcatcaggtatttgggagagaattccccagccaggccttcagcagctaccgggagggaccctggggggaggaggctgccctggaggcggagggagtgcaggggaggttggcaggtgctcaagggcccccggcttgggttaatgctttctgttgccattttgaaattctttttctttttttgagacggaattttgctctgtcacccaggctggagtgcagtggtgcgatcttggctcattgcaacctctgcctctcaggttcaagtgattctcctgcctcagcctctcgagtagctgggattacaggcgcacgccaccagcctcccaagtagctgggattacaggcgcacaccaccacgcccagctaaatctttgtatttttagtagagaccaggtttcaccatgttggccaggctggtcttgaactcctgacctcatgatccacctgccttggcctcccaaagtgctgggattacaggcgtgagccaccacgcccagtaacaattttgaaattcttagtcatcttcgaccaacaggccctgcacatttttcctttccttttttttcttttctagctgattgcagcctcgaactcctgggctcaagtgatcctgttacctcagcctcccaagtagctgggaatacaggtgcatgtcaccactcccggcctttttttttttctttgagagagagtcttgttcttgttgcccaggctggaatgcaatggcgtgaactcgactcactgcaacctctgcctcccgagttcaagcgattctcctgcctcagcctcccaggtagctggggtttcaggcgcccgccaccacgctcggctaatttttgtatttttagtagagacggggtttcactatgttggccaggctggtcttgaactcctgacctcaggtgatctgcccatctcagcctcccaaagtgctgggattacaggcgtgagccactgtgcctggcttttttttttttttttttttaatagcgtcttgctctgtcacccaggctggagtgcagtgacatgatctgggctcactgcaccctccacctcccaggtttaagcgattctcctgcctcagcctcccaagtagctgggactacaggcacacaccaccacgcccagctaatttttgtatttttagtagagacagggtttcaccatgttgggcaggctggtctcgaactcctgacctcgggtgatctgcccacctcagcctcccaaagtgctgggattacaggtgtgaaccattgtgcccggcctcatttttacattttttatagagataggctctcatgatgttgcccaggctggttttgaactcctgagctcaggcgatcctccctcctcataccagttctcaggacaggttgctgagaactcctcaggctctgaggacactgaggtgggagggaaaccgcgctctccctgccccttgccccccagcgaaaacactctcatgtcagaactcggctattactaaacacaaacagtggttctccggacaacgcaggtgtctaggtttctccttctcttccagaaatccttttaaattgtgctaagaaattactgaggttgaaagacacacacaaagcccagggaaaaaaggatgcaggcctcagacccttgaccttgaagggagcaatggaaatagcccccccccagaggcgggggtccagaggggactggtggaactcgaacgtcccccacaacacacagggccctggcttggggctgggcctctcgggctctgaattctggggtgaggcggggatcgggagccgtctcttctccttggaggagctcggggggtggatttccttgcttggttgggggtggccgcaaggcctgtggtgagagcatggggggtgtccaggccccctggtgtctgatcctgagcccctgagccctgtctacccctgcaggtcatgcaggcagtactcagcctcctacccaccctcaactttccatccatgtctaaaccctgaaacagatagttcagaggcacaaaactaagggggcggccgaaagccaggatgctctacgccaaactaagaaaataatcaccagcacagcgtgttttccaatccgccaagttctgctgtgtcatctgtgaaataggtgcatgaacggtaaagtactgtgtaacgcaaaaagctaacattcactattgggtccttcctgttccaacgtcactcccttaagggccctgcccctgctgcccagagcgtccaggcattcagcacccctactgtgtggggcaggcgtgcccggtctgttctccctgctgcccagtgggtgggcccttctgggtggagtagaacatgtttaagcccttaacctgggaccagcgctccctcgtccacagggctgctgtgggacgtcaagatggtttcctggccaggtgaggtgggtggctcacacctgtgatcccagcactttgggaggccgaggtgggacaatcacctgagatcaggagttcgggaccagcctggccaatatggtgaaccccatctctactaaaaagacaaacaattagccgggcgtggtggtgtgcgcttgtaatcccagctactcgggaggctgaggcaggagaattgcttgaactggggaggtggaggttgcagtgagttgagatcgcgccactgaagtccagcctgggcgacagggcaagactccatctcaaaaaaaaaaaaaaaaaaaaaaaaaggcttcctgaagttgttgtggcagaggatcagggacagcagagggtgagattcgctgcgctcccccccaccccaataaaaacactctcatgtcacagcttggctctcgtatgactaaacacaaaccgtggttctccagacaacgcaggcatctgtttctccttctcttccagaaatccttttaaattgtgctaagaaattactgaggttgaaacacacacacgcaaaacccaaggacaaaaggatgcatgcctcagacccttgaccttgaagggagcaatgaaactagtccccatagaggcaggggtctggagaggtctggtggaacgcaagtgttgcctgccatgcacaggcgcctcactgggcctcttgggctctgaattctggggtgaggcagggatggaagccatccctggagcagaggtggagatgggggctgtcaggtttcattaaggttcgtcccacacaggggactcttctaaacttcttgcttctcacggtgagtctgacactggcgtcaccagggagaaatacaggttctcaggccaggcgccgtggctcacgcctgtactcccagcactttgggaggctgaggagggcagatcacctgaggtcaggagtttgaggccagcctggccaacatggtgaaaccccgtctctactaaaaatacaaaaattagccaggtggcgtgggcctgtaatcccagttgctcgggtggctgaagcagaattgcttgagcccagaaggtggaggttgtagtgagccgagatcgcggcagtgcactccagcctgggcaacagagcgagactctgtcaagaaagaaaagaaagaaagagagagagagagaaagagagaaagagagaaagagagaaagaaagaaagaaagaaagaaagaaagaaggaaggaaggaaggaaggaaggaaggaaggaaggaaggaagaaaggaaagaaagaaagaaagaaatgcagattcccaggcccacaccagacctgcagaagacgaatctgctttgaaatgatgctcccccatgggaggcagatgcattcttaagtttgggaggcgcagacgcccggaccctttctcctgggttcacaggtggggcggtcaggagatccattagcctgagccagtggagctgcccagaggccgcaggagccccagctgtcggcccctggggtctgaacacctgggggatggccccgagcgctgtcagggctctggctggagcacagccctggccctttggccccaggtggtgtcagacaacatgggtttttcctggaagccgagggatcatttagtcacgtctggaagagaaggtgatgaacacagacccacaagacacacaagcaatagagaaactagcaacttgaaaacgggctccgtaaatgctttccgagagaccgggctgcgggcccatgttagctcagctctctgggtgctgggcgcgaccatccagtccttggctgattcttggtagcaactgtcaccatccctacttgatctcattttcctgaggatctggagggggtgggcagcgtggacccatttcacagagggtagagcggagactcaagagagccagggactttcccctgggtggcacgctggggagtggtgtcagagccaggatttgaacctggactctctgaccttgagacccctaaccattcccatcccaaaggagacaaaggagatcagtctcacggaggggacactgaggatggccccagggctcgggagtgactatggttccacatacagacgagggaagaggcaggatccccgggtcactgttgggggagcactggtgtgggaagcagatggaggggggccatacccaggggccactcggtgggcccactgacctgtgaacctggagaagaggggcatctgggtgggagctgaagggccgtgggtcagccagcacagggcacacccgaactgggtgtcccctcgtgggctcccgggacctggcacaggcttacctcggagggaagaggtccccatcccctggcactctattactgggctgtgggctgctcacaagtcatacaccatcacccctacaccagcacatcgcaatgatcccacttcatttattaccaaaatatcacagaattccagtcatagttaacatacagcgtttaacacgaacctgatacctgtagaaagaactgagtatcgggacaattgagtcgttggaactgtaagccacgccccaaaccgcatcactccgtacttcaaaaatacgattttttgagagctttggaaactgaattaaaatgtctacacagctatgaacaattgtttaataaaactttttcatgtttccattacatgtaaatatatcaatttggcatctctataaaaactctgaaaatggtgcaaaagtttcattctctttgagaaagccattgacaaaaaatattcacacttcactaaaattttgaaaaatggtcttctttcaaagcttctttattaatctgaagtcttctgggttatcaaaatctaggtttgctttttcctcctaaaacactaaagaacatttattcacaaggattaaaaaaaaaaaataaaaaggcaatgggctgatggaaaactgataagggcttttctttttttttttctgaaaataatttaaaaagcttaaaagttacataggcatcttcaaaagaacacaatgggattcattttattgttgacttttggacaccagtgtcagactttattgaaaacaaacccatgtaaaaacaaagttaaaatgaaaaatggcacctgaaaaataaattattttatataaaacaaatcaataacttaaaacacactaatatacaaaaggtctaaccatctactgtacaacatgggaatcggttaagagagcctcccctcccccaaagcaagtcactgtaaacggaacatcacatggtcatggtcaaagaggtggccccaaaccaacggaaaaggcttctcttctggtggaagaaaaatccagtcctgtcaaagtctccgttagcctaacttaggtactggcggtgacttacaagtgagaaaaaaaaaatttgtttttttaaatggccaagaaagaaacctgaacgatgtcactgaaaggttgtagaaaaataggatccagccattagaggtcaggggaaatcaaaaaggtttggaaatgtgaaccctgcctgggatccgagattcagattctactgccatcattacacgccaattgccaatgccacttaaaagaaagcacttgtgacttcagggctgtcttgcgaagtttggggacaggaacccctgacccccagagtcagctaaaccccaggggtctctgctaaggagctgcctcaggtcctagtaggtgaggtaggtctggggaagatgggaggggattgaggtggagggtggggtggagggacaggatagaggcctcctgtcagctgaattcttattctctttcatccaacacaggaaggctgcgaaaagcacatggaaataaaagggggctgaatcggatgtgaaatgtaacagctgagtgatgtcaatttcgatttttcaagtccgatgccggactgggtaagtcatgtcttttcaatgcctggtggacaaatggccttcatttggaagcaaaccgggtcaaggaattgccactaaccgtcttcgggtgcttctatttctctgatccagcagggacccctgggctgccggctccaaagggccggtcttggctcccaacagcagcacggttcagtccctggaggctgggtctccaggactaaggccaagcgcagactctcagaggttaaggcagctgcccttggccaggaaaaggctcaccttccaggagaaggtggcggaacccacccagcaccacctgcgggcgggcccccgaggaagcccatgaatttcaggatattcacgcaggatggtggccggggaggggactcagcacccgggagggaatcagtcacagagctgcgactagaggcacagccagcacagaaaactgcggcttggcaaattacactgaaaacgaaataatggcagagccaagggggaacaagggagaattcatcaggaagcaggttcacaaattcggagctgcctggggtctaactaccagaggaagttacacacgggtcaaaagggaattcaatcaaagcctctttggtatttcccaaaccagatttttgataaatgaacattatctactctgaacgctttttcatcgaaattcccaaataaaagcagagcactcatttttgctaaatagaaatacaactgatctatgtaaaattttttaagaaatggtttcttttgggttgagccttttttaagaaaagggatctcccctttgcaaacaggccttgataagatgtaatgaactttgaggacacagggccagcaactagaaccttgatggaacagagattgcttttcaggagtgacagttgttaagctaaatccttccacaagcttgcaagctaagactcccaaataaaggctttggaattttttagctagaaggctgttcaaacagcggagaccacatacaatgagaatgttcctgaactgagaaacttcagggaactttcaaaggctcatatacttcacagtttcttctcacctgtcccagcatcagaataattgataggattcagataaaagggggcgaggaaagaagctgaggtgctacaagcccgtcatcattttcacagttgaagcttaagacagagttctctgttgaatgctagctatgggcatgtgtgggagtgagactccagggggagtttcagaagcgggaatcccgccttccatcagaagggtgttggctcccaccttccatcagaagggtgttggctcccaccttccatcagaagggtgttggctcccaccttccatcagaagggtgttggctcccaccttccatcagaagggtgttggctcccaccttccatcagaagatgctggcccagggaaacctgaaaggcttctttttccaggaaagcattctggtcccaggatgcagactgctctcgggcaacagagcagggaccctcttttgtgtcgaatccgggcaatgggcctcggttttggcttttcctgaggatctgggattctgtgggagaaaggaggtcctctctggcaccaggccgacttttatgagacacagcctgggtacggatggcaacatcatcaatttgcaaggatcgcgcacacagcccctcagtaaaagatcagggaaaggggaggggatgggcatcctcaattgtccaggggcctctcgagacgctgacctgctctggggacggtggtgcctgcctattgctcaatttcacacttcaataaataaatacataaataggtataaataaacagataaatacagccatcatctcatgagagcaataactaaaaaacagcctacggtcacgttttagtctcacgtcaaggttaaaaactgctggtactaagttatcctgtttgtgattctctctgtaaactagttatttataaacgccagatcccagtcctgaggagttttgggtgatctggccctgcctatttcacaggctttctctttcacccttcctccgggctcctggtttaaaagccaccagcctgtaactgcacattcttgcgtcacagattcagaaatgcttttgcttgaggcaaggattggtttcttaagatcttacgactcctccctgaatgctgggccacctgcaccttccctagccaaaaagaaagaaaaggtaaaataaaaaacaaaacaaaattcgagcaaaacaaaatcaaatttaatggtcttaaatgcaaaagtaaaaacaaacaaaaaacacaaaaaagcaaaagaaaattaacagaacagaacaacccaaaatgtcaaggcagttatgaagagaactttgagggttaatctttaaaactacaaatcaaaggttttggttaatagataactggcaagaagtaagtacttttctgctgagtgttcatacaaaagcaaaattccaaaacaaaatccgactaaaatagaaaaaggtctaagcgctcacgagaagggatgcgagaaatacaatgctcaaatgtttctgtgttattaaaatacagagccattttacgcctccaagctatgttaaatgctctggaaaacgggagaaattatcgtgaacaacagtatccaatgtgtggggcgctgtgcatgcaatgtgtggacagaaactcgggatgtcagagtagcaacacatcttcaggcgtgcctggagcttagatctgactctggaatatactggagtttccctgaaactctttggtccattcccattggtgcctgggcttacgaaacacgtttgtgtccttctctggagggcccgcccagcatgcagcccgtggcccccggccccagtggtggcccacgctggacgggcccgccgccattcccaggaccactcggcagagcccgggactgagtgagcaggaggtggcaacgggacctgcctggaaaaggaacttcctgtcaaccaaagcatacatcgcttacaatgttgaagcggttgagaaaacgcacactcagcatctgtctaacatctttagattaaaaactaaaactaaaaggtgatttttttgctacccagtctgtggagacattgaatgaaacgcgtgttagacagtcttagaggttaaagcatgcttcaggttcaccaccatccagagggactggttagtcaatgcagttctacttagatttctgtttaatatatatcttaaaggaaataacttacgaaacttaagattggtctaacattgtgggatttcaaacatttgaacatgtcggttgcatcccagagtataaaaaccttctcacttctcattcagacaaagacaaacacttgtgaaaattggcgcaaaatgagttgtacactaacaagaaaagtttcaactccttcactcttaattatctattccgtacaaaaaaaagcatgagcgagttatttgtgggacttgttggttttgaaggaaacctgtaagattttgtcccccaggcggtagccgttcaggctggctatggccatcgcggcttcttcatagtttgtcatggtcacaaagccaaaccctttgcacttgttggtgttgaagtcgcggatcactttcacattggtgacggcaccaaacggcccaaacatctgccagaggatcccctcgtcggcatcctgccccaggttgtagatgaaaatgcaccagccggaggaggcgtttcctggcacgttgacgccagagagcccgctcatgtgatcgacgcccatgggggagaacctggcagacagagagcaagcgtcaggccacggtcagcgcaggcggcctggggatggggcaaggcctggacgcatgctgaccatggccgctgggccccatcccgctctgcgcagccacgaggtgctcacggttgagacacctgcatgggtcaaaaccctgggaggaattaaatacagtagtggaggggcgggaccctgttctgtagggagctgactctgaggggctggttggtgccctccactcctcccactgtgtatgtcggggtttctgtttaggggttcctgcggttccccacattttagatgatgggcgcttctcctggtcctccgttgaaggtagaaatgctctgcaggcctctgacagcctcagttctccctggaggaaactctcctcgtactgtggggtacgtgcaggggctgaactcctttttccaaattttgcaccttccccttatcatgacccgcccccaagcgttgacagcccagtggtctctggttagagcacgcctttgccagggccacttgtagggcacaagaattccttcccaagcaccaggcaaccaaccctctgtggctagagctcaacatcccctgagggtcaggggccaaaccactgaggactgagaactcaagggacagggaagggccctgggacaccagcaacggcaggctcaccaaacttgaccacacacgtggggctctttccacagtgatacttttatttacataaaaaataagcctttctgggccaggcatggtggctcaagcacggaatcccaggactttgagaggccaaggtgggaggatcacttgaggccaggagtttgagaccagcctgggcaacacagagagaccccatctctaggaaaaaaacaaaaacctcagaaaacaaaaactaaactaaactaaaataaaataaagccttctgaaaatgtacagatgctgtaataaggattaaggtatatgacaaaacagttcctaaagctatgtttccctctggaactttctcacattaaaaaagtaaaggtctgagggtcagtttgggaatatctgagtagcatacatttgtgaagccggcatctgtgaagctgcgtgatgcatgcagagaagcattacctgctccaaaataaaactgggcttcaggctatggccctatcagccaagcgcagccctgcaggccccagccggggtaaacgagtgccttcaagcgctgttaaacagattcaccctctcgacagacacgagaggacaccagctgccatggggcagctcactagcccaacggtgattttctttatttttgagagagggtctcactatgttgtccagtatggtctcaaactcttaggctcaagtgatcctcctgcctcctgagcagctggaccacaggtgtgtgccaccatgctggctaatttttacattttttgtaaaaccattttcaggatggaaagactaagaagaaagggtctatgttgtccaggctggtctcaaattcctgggctcaagtgatcctcctgctttggcctcccaaagcgttgggattacaggcgtgagtcaatgcgcccggccttcttaggaattactcttgttggtagtttttctcctgctgatttctctggtcttgacagtcataaatcttctcctctcttcctccaacccaattcttttccatcccttatctctgggcttttctggacgtgatagggactgactgcaaactcactgcagtctgggtctttcttcctcctcttctctcagcctcctgagcgaatctttccctccagactctcccgccctccccacttccttccatcactttgtcttagtggttgccctgccactcacttttcctgctcgaccagaaatgtccacttctccggtttcccctttcttttcttgtcctcattactgggaccagagtcccatgtctcctccaaccttccctgttttccttccaggctaaggagcagttcacccaaccccaccgcccatatagcccgccccatcaagagcaggaccgactgtatgatgggatttctagagctggattttaaaattcagctccattccgtccagagaagcttccccagccttgtcttcaagccagaaacctcaaggaaggcaggccagctttggaatttgagccaggctgagaatgctgggtaactcagccatgagaataacacctctcacagcagcatgtgtggcactgggcagcgcccacccagcttcactgttaaaacaacgatggggccgggctcacgcctataatcccagtacgttgggaggctgaggtaggaggatcacttgaggctaggagtttaagaccagcctgggcaacacagtgagaccccatctcaacaaaaaataaaaacattaaaaattaaaaaaaaaagggaaatctatccttgtcatacctgagataagccctcgatgccactccttgaggttttgacaaaaacaaaacagccctgacactgagacctctgctgtttctgaggcgacagcacaccacatcctggagtccaaggccctgactctcatcgcctctatcccacttcatcctggcagccagaaccattttcaggatggaaagactaaggaatccgggaaaactcctcccctctaggacagggcttataaacagaatgcatacatacaacattcaccaatacaaatgactccacgaggcaggtgtttgaaaaaggtttgccttagggctgctgatcaaatgtctaagaatgctggaagatctactctcacccgagtatacctaaggcagcatcttttctcccacagatatgagacgttcattattcatttattttttagagaaagggtctcactctatcacccaggctgcagtgcagtggtgcaatcatagttcactgcagcctccacctcctgggttcaagcgatcctcccaccatggcctcctgagtagctgggactaaaggccagcatcaccatgcccagtttttttcattactttttgtaggaacaggggtctcactttgttgcccaggctgctcaaactcggggcttcaagtaatcctcctaactcggcctcctgagagctgagattacaggtgtgtgctcccccacactgggcatgaaaccatctttaaagctcgcggctccgttctgctgttactaggaactgcgtgctgaagctctaagtgctcacgctcacagcaactggtggggactggtgctgtcttttttttttttttaataaaaacaaaaaaagacaggttctggccctgtggcccaggctggagtgcagtggtatgatcacaactcactgcagcctcaacctcctgggctcaagcaatcctcccacctcagcttcctgagttgctgcaactacaggagcgcaccgccatgcctggccagctttgtattttttgtagagatggggtctcgcaatattgcccaggttggtcttgaactcctgggctcaatcgatcttcctctctcagccacccaaggtgctaggattacagggataagtcactgtgtccagcctggagtcactgttttgattcccatgaaagacaacgcccaatcggaagtaaacggctttcctacagacacctttctgatggaggttgtggtgtggagctgcagaatgattctgaaacgcgctctctgacgggatcagtctatcatccccgtggtttctattctgtggctgtgccgtcgcctgccagcggggctaagtatggctttcaggagcgcgcaccctcccgacccacctgaatctctgcgcctggtggtgaacggggcctccgaaccgtcgcgctggcgagtggtacagctgcgagaggagtgccacgtttttgttctggttggggttggctgcaaacttcactgtgatgggctcagaggaacctgggggtttatgaccattgaaactggtaattgcctcttctgcctccgaccgtttgtcaaaccggataaacgcaacccctctggacaaaccttttcaacaaatcaacaaaaacggagttagggggaaaaacgctaggactttcaaaactgaaaagcaaaagtcaggtcagtctactgtgggccaggctagaagtctggttaaggaaataaacaaaaattaaacctaaaagtgaaaacaaatggatggagtaaagaaaaccaatgactaacagaagattaaagcttcagactttcttcccggctgaagccatgactccacagtgttggcgcccaaagatattttggtgacagacatccccaatagacacccaggcctcttatttggaagaaagcaacattaggaaacagcacatccaccgtcactatttagctgccaggtgtccgccacagagtgggtgcgtgggtgtggtgtgtggttggtgggtaacagggttggagtggggactgcgtctgagagatcctccctgggctcaggggccactctcctggctgctgtctctgggcccgctgtgacagcaggcctcgtggccgagcctgctgcaaaggtgcccagctcagcctgcatgccttctccttcatgccaggagggagtagggtcctgtggccaccccctgccagctccatgctgctgctgtcacctcactcctgtcttgggatactccactctaaggtcctacacccctcccgtgggccccaaattgccatcagaatcaaatgaggccagaacactgcccaggctcatacagcagagctgaacctatccacaggctcgccaggcaggcctggggtccctgtatgggaagggccagggccccagcagccaagcccagagggcatcttctcttgccacctcaactgagccacccaagggccagtcccgggttcccggctaaacccaatccctggacggagcagtgtgagacctgaggaccgtcctgctatgggggacattggtcagctgggcatgggtgtgagatgctgagcaaggcgggtggaaggagagcatggctgtcctgcacccctgcctgtccatacactaggcccgggagggaaacatgagtagcccgtcccttgaggaacctgggaagcgggctggaaactggatgagggggatggggatgagggcacactgagcagcgcactagctccttctctgggggcaaggacatgatggagtcaggggaaggcccaggggtgggagaggtgacagctgagaggccagtctgagagtgacatcactaggcgggagtcacgggtgtgtcccagtgggagaggccgtcacagacagcccaacccaaacaccctggttctcaagacttttagtcaagccaggccaaggctcatgcctgtggtctcaactactccagaggctgaggcaagagaatcgcctgaggccaggagttcaagaccagcctggacaacacagtaagatctcacctcttaaggaaaaagaaagacttccagtcaaagggtgtcttaagtcaggtttcttctccaggcaaaggcctctggtgcatggtaacaaacaacgaccaaagccaggcagcccggggccttgggtgacctgtccagcgggcacccaactgtccccatgtcctgtctccacgcctcacacggcaccttactccaccacttcccagagggtcccgccagctgcccccacaatcgcgacactgcaggccccccgtgagcacagagacagcagctttagtaaggtcagacctagcgctacgcacacgtgccaggaatattctggggctcaagctcatttctgagctgctgctcagaaggaacacctgaaaacacaaccctgacagatgctgttttctttgagtctctcacgacacgaatgacagcttagtcagtcttggaaacctaaatgaaaatcgaactttaggcaaatacgactgagagctgacgctggccggctcgtagggaagctggctccaagcagatggcttcattctgtttctaaagaccctgcggcccagcggagagaaggcacgtgtgcaagtgtggcttcctcgtctggggttgtagagtggctttcaaatgcaaactgcctgagtgaaaggaagaaagctctagtaaggggggcaggagggatgctgtttagcagagggggatatcaattcactcaattatttaatggatgtatactttctgaagatggctctgcattttttgtttttttcttcccctagtgttttttatttttaattttttttttaagatggagtctcgctctgtcgcccaggctggagtacaatggcacgatctcagctcactgcaacctccacctccccggttcaagtgattctcctgcttcagcctcccgagtaggtgggactccaggcgcctgccaccatgcctggctaatttttattttattttactttatttatttatttagagatggagtttcgctctttttgcccaggctggagtgcaatggtgcaatctcggctcactgcaacctccgcctcccaggttcaaacgatactcctgcctcagcctccccagtagctgggattacaggtgcctgccaccatgcctggctaagtttttgtatttttagtggagacggggtttcaccatgttggccaggatggtctcgacctctcgacctcgtgatccgcccaccttggcctcccaaagtgctgggattacaggcataagccaccgtgcccggcctatttttagtacagatggggtttgccatgttggccaggcaggtctcgaactgctgacctcaggtgatccacccaccttggcctcccaaaatgctgggattacaggcgtgagccacggcccccggcccccttgtgttttttagaatttaacagcagagtccaagaaacggcataatctccagatgaatacactataaagttcacaattaaggtggatatagaagcgaaggaatacaaaaaattaagctctgtcagctcagggtgggattttttttctctttttttaaaaaaagagttgggggtctcgctatgttggccaggctgttctgaactcctgggctcaagcaatcctcccaccttggcctcccaaagtattaggattacaggcgtgagccaccgcgcccggccatcctcatctatttaacactaaaaagcccgtcacaggaaggcaaactccacacaggctggcctgccacacacactctgtctccagcagagggagctacagccctgggatgggagcctcaccttcccaccaattctgcatcctggggtgggaagcagagccgggagaccctcctggctcccttctctctgcctccctcactgctctgcaaagatgacaaaggttccttaggccaccttgaggttcacagccgaccctgggggcgcaatactaaggtgcccccaacaccctgggagacactatcttgcagagggaaaggaagcaatgcccccagcagctgtgtgcagaggtgagttccccctgcctgtggcccgtgtgtgcctgagagactagggaaggccccaagagagttgggtggctggaggcatgttctcaggcattgggggctccaagtggagcacaggcttccctcatcagggccatactggacacagacaggccgaggcagagcagtgcatgtggggtctagaggaggaggggagtggactgtgggccagtgaggttggttcccccggccctgggccctgcacagccagctcagatgccccagtgcagaatggggggcaataaacccacacactggcccactgacaggatcattcgctcagctggcacttaagtgagaggacttcagggaccacaggagactcttctggtgcagaccaggggagtttacaccgagtaactggcatcccccgaccctctccccagagcaaaggcagaatggcggcggccgtgcgagtgagccctgtccttcggcactgcccggtgccagggcgcgagtctgtgctaggctacaggaagctcccagggcccccatgaagtgcaaaggggcccttcccctcctcgggccccagcgggaacgaaggccggcagcggcagggccagtgcatgccaggtggggttcctacagccggaaaggaggaggaagagagactgataaggccgcccaccccaaagcacgcagctcaggggacgcaggacaatgtgcatgcccctctagcctgcaggccaggaaggccccacctgtgtgcacatgaaaggcgaggctctgggctgctgggggagtgctgctgttctctcaaaaagaggtcacctcagagcatgactttctgtggcccaactactcggtgttatttcaacatcacagccaaggtgcggcacacacagtctgtgtgggaagaatatgaaaaccacccatacaacgcatgggcctcactaggctcagggagtggattcttccctgctggttagttagcagactcctgctcctgccccaaacagagctgagcgatcctaaatcccctcagggtggcccgagctccctgtcccccaggcggggccacgtgcagggcttggcaaaggatgtggtggggcactagttcctagcctagtgcggcaggcgggccaggcagtagggccggagcacagccgtgggcgtgcacatgtcccctgctcatctctgcctgacggcatcacacaaagcccagagcccacatccagtgccaagacggactgggagggccagcaaagtggccaggattgcctgcccattagaggaattcgctgccatgtgctctgtgcactttagatgtgctccccagagaggggcatccgaattctggggatttgggccatcagactactgcaccccaaatgcctgcaacgaaagccacagtggacaaatgtgcagcagcctttttttttctttttctttttttttaagaaacagggtcttgctctgttgcccaggctgaagtgtagtggcgcgatcacggctcaccacagctgtgaactcctgggctcaagcaatcctcccacctcagtctcctgagcagctgtgatgacatgcccgcgccaccgcacctggctgcagtatcctttttttttttttttttttttttttttttgagatgaaatcccgctctgctgcccaggctggagttcagtggcgcaatctcggcttgctgcaatctccgcctcctggggtccaggcgattctcctgcctcagcctcccgagtagctgggattacaggcgcctgccaccacacctggctaatttttgtatttttagtagagatggggcttcaccatgttggccaggctggtctcaaactcctgacctcaggtgatccgtccacctcggcctcccaaagtgctgggattacaggcgtgagccaccacacccggcctgcagtgtccttttcaccccattcatgggcaaggccagcacatttgggtgcctgagggaaggtgctagaatctcttggcgttttcactgtacatgaaatgctggcctaatccccagctttttttttttttttttttaagacggagtctcgctctgtcacccacgctggagtgcagtggcaagacctcggctcactgcaacctccgcttcccgggttcatgccattctcctgtctcagcctcccgagtagctgggactacaggcgcccgccaccatgcccagctaattttttgtatttttagtagagacagggtttcaccatgttggtcaggctggtctccatctcctgacctcgtgatccacccaccttggcctcccaaagtgctgggattacaggcgtgagccaccacgcccagatatccccagcttcttttaatgccatcttacctcctcagcctcctcaaaccaaagccaacgtcttctcattttggtgctgtcctcgtttgcggaataactaatgacatttaaaatcaaacggtgatctgccttccctagaaaacccagcccccacctagagaacaccctccccacgcgtctggggcccctctggtacctgtagtctgatccacgaggacccgcgagttgatgatccgcccaaaccgagagaacatgtcttctacgtccttctgggtcatggtccgcgggagcccgctgatgtacaagttggcgtctttgatcacctctgagctcgggcgagcatacgacaccttgggaacacaaccactttccgagattagtacaggcacgtggccaaagcattgaggagggtgttgaatgctgggttaggaaaagccaacactgtgtgttagaaatcatgcagggaacgattatcatcactgacgctcaccgcctgcagccgcatggtggcaagctcactgagggatgggccgtgagccaggatgcctggcagtgcttcctcactgggtgctcaccatcctcaaggaggcaggcgtgactcctatgtcacaaagcccagcaactgagggcccgcagcttgtgtgtggctacctctctgatgtgctggacagtgagccggtgccagagaggtcctggtgcctgaaagcagcccgtgctgcagcgggcaagcaagctgggagctactgggaacacaggagactcccctgccaaagagcaagctcgccacagaagccctgacaggggctgtgagttctgggaggaccccgagtttgtactcaaatccactcaagtgttcaatattaaacgactcaatgccttttggatttatattttgcaaaatcaaagaaaactgaagagaaccttctgggtgctttgacaaaatggtacattcatcattcgtgtggagagggtggtgaggggagcccggaggccaatgcaagacaaggtcttcggtgctttctcaggttggcgctgacggccgtgcagaccccatgggcccagaaggaagaaaaggaccacagtggaacccctctgcctgtgaaggggcagcctggcaggactcacagcctcgtcaggaggctgggatatggaggagggagcaggagatgtgttcccgagaagggtggggacttgaacctgtgcgaaaggaagttcattccctttgagtgaggggcacagaactgatgagccaaggtaactgagaccagaacgcagggagaagccgccactcaggagtcactgggcagaatctgcgtgctgagaacacacacacagcatcctctgagaagctcctatcatgttccagagaaggaacaacagacattgcccctgctcatagggcagtgggcggcccagcaggggaacaggacagccccacgaggagaggagtgtggggctggaggccagctctgcctggtagcggtgggaatcgagggagcatgtcactacggagcccatgaggtctctggggaagccgtgctgctcccaggcccggggcacctccatcagcctgtggacaggagctctggggacacttgctcaccccatgatgtgggtcaggggctgccagtgctgtccccagagaaaaagaggctgccttggcccccagcctcccctagtgtccgggcttgccctggctccctgcagacctgtctggactggggcagtatttgggggcctgccaaaccatgaccctggcgccagtggagcggagctgaggctggcactgactggacctactgccgtccctggatgaagccccagaggagaagtgccctagagccaaatgctggggaaagctctgatgcctcccaaggacaggtgtctccaaggaccatgggaactctgctttcctcttctctctggacactgtcatgttcagtcaggctagaatcagaacagctggcgcacagcaggcgtgcactgacctggggctccccggcccctcggccagaaccctctttcctaagctcccaacatcgcttgctctttggcctcaatcaggtctttttctggctgcccattctcaagaattcatccagtgaggggttcaatcgtgttccccccaccccacaatccaaattcatatgccgaagtcctaaccccttgggacctcaaaacgtgacctgatttggatacagtcattgcggatgtaatcagttaagacgaggtcacactggtatagggtgatctctaatcaaatgtgactgatgtccttataaaagagggaaatttaggccaggtgtggtggcgcaggccagtaatcccactgttttggaggctgagtgggaggatcgcttgaacccaagagttcagcctgggcaacatggcaagaccccatctctacaaaaaaaattagctggtcgtggtggggcatacctctattcccagctactcgggaggctgaggtaggaggatcacctgagctcaggagtttgaggctgcagtgagccgtgatcacatcactgcagtccagcctgggtgactgagtgaggtcctgtctttaaaaaaaaaaaaaaagtatttttttttggctgggcgcagtggctcatgcctataatcccagcactttgggaggccgaggcgggtggatcacgaggtcaggagatcgagaccatcctggctaacatggtgaaaccccatctctactaaaaatacaaaaaattagccaggcatggtggcaggcgcctgtagtcccagctactcgggaggctgaggcaggagaatggcgtgaacccaggaggcggagcttgcagtgagccgagatcgcgccactgcactccagcctgagtgacagagcaagactccatctcaaaaaaaaaaaaagtattttttttgaaaacataaattcaatttagaaaggcgggaaatgtggatacaggcactctcacagggagaagtctgtgtgaagatggaggcagacactggggtgatgcttctctaaagcaagcagtgccagagaccaccagcctccaccagaagctgtgagagaggcctgtgacagatcccttcccagtgccttcaagagaaaccaaccctgctgacaccttggtctcgggcttccagcctccagaactgtgagttgatacccttcttctgttgaagcaacctggcctgtggggctttgtcatggcagctgagcaaactcctgaccactcagcttgccacagatccctccactggcatcaacgcccagttcctcctgtccctatttagttcttgactgcgttgatcatgacctgacacgctacattttttttttttttttttagttttttttgtagagacagggtcttgctatgttgctcaggttagacttgaactcctgggctcaagtgatcctcctgccccagcctcccaaatgccctggattacaggcatgcaccaccctgcctggcatctattttacttatttaacttttaactttgcaaacagactctgtgagggccagacttgtgtgtctcctgccatatccaaagcactcagagcagcctcaggtgaacggcaggcatctggggaccgctgctgcgtgagtggagtgcgcagtagccactgctgtgaagaacgcctgcctatctgcactgcagtccccggcgccggcttctgtgggtgacaggagttctgctgttctggttcctgaggcttggatctcacaatgtgctggggaagcctccaggtgacaatgttaagtgcctgtagccacatacagcacccggtttcacaccctggctttgcccctccatccctccgtgaccttggcagagctgtttcactactcgaaacatcagcttcttcaacccgaatctggggaccattttttatggggctgtggagagggcacgtgagatacaggatggaaggtctggccccgtcagcctttgataagcactggctgtgtgtggcacacagggacccagcagtgatgaagagctgcacacagagactgtgcagcatcccagcagggacactgagctgcatctgggacatgctcagcctgtcgcctccatgcaggaccactcccactgtggctgcctgggctgctactatgggaaaaagatagatagggatgaggagacaggactcctccttctccactctgccaccaagggaatgacatcaggaccaaagaggacagagcggacggggtgaaggcaaggcacgtctgcgctctctgtgcagggctggggcctcagagcccaggatgagcacaaggctccaggaggccctgcctgcaagggaggagcggggcagaggcttggggccagcctgcagttcccatgatgtgcctggccactgggtctcctctaggatgcggcccttgccttgtgcccctgcaggtcctgctgctcagaataccctcatctccaccctggtctggctaactccctctcctcctccagatctcaactctggctttcttgagggagcctcctctggcactggccactattataggctcctaagcccaccctgggaccaccttacagagaatggtgggcacaactgggctccccgaggatggaccatgggccagtgacccccagcacctggcagagggcttggccctagcccgtattgtcataaaggatttgtctggtctctgtcccagattcctaggaggaagcttgtaaaactcctggaatttctgtctttgttaccataaggccttggatcccacttgagtttgtgctaagtgatggctcaggatgggctccgacaccagaaagaccaagcatgtgactagacggctggggctgtgagctgggcgataccggcctgacctccagggtgggggaggggaaaggggtgctggggatggagttcgatcacatggccaaagagtcaatcggtcatgcattcgtaatgagcccagtaaacacggcagacaccaaagctccacggagcctcctggcaggtgcacaggtcacatgcagggaggactaggcacctgatcccaccaggtgcagacatgtgagctctgtgcttgggaccctccctgtgtggctcttcatttggcaggccctgagttgcaacctttataaacaaactgtcatcagaagtgtgagttccaggagtcattctagtgagtcatgcaccctgaaggggtggcgggaaccctgaatttgtagccagctggtcaaaagtgcaggggcctggggtcccccaaagggtgactggcatctgaggtgagggcggtcttgttggggaccgtggccttaaatgtgctggggctgtgctaactctgggtgactggtgtcagaatagaactgcaggacaccaggtggcatcagaccaagatgcaataaaatccaggatcagttgaacgcacaactccatccaggcccttatcacactgcacagatcagtcacctttaaactggggatggcaggggatccgaagtccctcagtatcaacgtatctggcccagcaccacactggccaggggctcagtaaaggtttgcggaatgaacacacttggagcacagaggaccccagggctgcgccgggggaactgctagaggagccaggcccagggagcctcggggagacctggggagaaattacttagggctgtcacgtccccatgaggctggcctgtttctgcagaactaggacagtggtgtgaagccactgagaagcagactctgccggcagagggcagggccgccgaaggtgaggcaggcttctgcatgcatggccgggatgacagggagggacacctgcccaggcctgggcccctggggtcccgtgaggctctggctccaaactcaggcagccactccagcctttcccaccaacatcaatcctagagaggcaagacagtcctgtttacacactgggcacccggctcctgcatctgagtaaacggaacagctgtgcaggaataatcaagcgttctgctccacacctcagcctggctgcctcagaaacaagaaccttcacacattttctaaataggggagagaattcctagatggggagtccagggccaaggataagccacctggggctggaggcgaggaagggctgcccctgctcaggtggaatcccatggcgcttggctgccctcaccagcccccaccggggaaggtgcctctgaggacctgcactggacacgaggaggcaggagtggcgcgcctgccctcagggagcccactgcacaccacgtccatgcggcatggggcaggtctgggagagctgctgctgagccagggtttggccactgagtaaccaagatcatggggcagtctgaaggcagggacagaggccagctgttggctgaaggtgctgtcactgtcaggtcacagaacccctcttggtgggcaggcaaaaatccaggctcccaggcccaccctgcagtgactcaggaggcccccctgtgaccatggaatctatatgttacagctccccaggaggccctaataattggcaggtccaagagggacccttcagggtgcctgatgtgactcagggagcacctttctctggggcaggggaatctagcagatctaaaggctcacacaggaccacctcattccaaatggccttggagcaagagaggggattctggccgggaagcccttacgtctgtgggtatcttgtgaaggcgggcactgagggcgggtgggtgcagtggctgctgcaggaagcccagttgcaggggcctgcctggggcacgggaggctcagggaaggctcagcagtacccaggactgacaggagaccagggagcaaaggtcggaaagacacgaggcttgatacaggtggcaggagctgcccacgaacccaggagccagaaggcagacacgtggggacgggggtaagtggggctcggggttgacagccccagtgcacgagagcgcgggtcagatgatgaggacagaggaaatccatctgtgtgacctggaggacctgcaactcatcccaggaagccactatggccctgctggaggtgctgcccctgggctgctgcacagttggcttcctcaagtcacctgccgctgtgaagcctccacacacggcaactgccggtcacacatggctatcctctgtcttgtttactgtctgcacccccgacccacgggggcactgaatttgtctgttttggtcactgtggggcacacagtaggtgctgagtgaggtgctgggtgagggaagggttacaactggccccaaggagcgcagagggagcactgggcaggctgggggtggatggagctgtccagggatgggaacacagagagccaggcaggagagacgacaggggaggcctgggagctgacgcaacctgggggcaccctgggcggggagtgggtcctgagacactcatgtaaggcctgggtcagatacacctgaccagggtatctgatgggagcccccgaggagcggctgtgctcatagtcccttggagagtgactgtgaggctgggcggggctcagcacagacctgtgcccagggcaggaatggatgcggtggtgatcagatccctttaccttaatggtttttgactggagcctcaagccgttcagcgtgttgatcgctctctctgcatccttcgcggtcacgtagttcacaaagccatagcccaagctgtgtcctgtgcaagagaacatgaagacattggtaagccaaccgtctgcgagtgagggacagggaggtcgggaagcactatatctgcctggcctttgggaaatgggattacaggtgctagcaaactttattttctttggcaaacacgtacattttctgcaatgaacacaggttcctttttttttttttttttaaagagataggatcttgctctgtcacccagggtggagtccagcgctgtgatcacagctcaccgccacctcaaattcttgggctcaagacagcctcccacctcagcctccagagtatctgggactacaggcccgctccagcaggcccaagctaattgttaaaattatttttagagatggggtctcactatgtcacccaggctggtctaaaacttctgggctcaagcaatcctcccacctcggccccacctcgacctcccaaagtgttgggattacagatgtgagccactgagcctggccaagaggttttacttttgtaattaaaataaccccaaaagttatttacaaaggagtattttttaaaaatactgtgctacggacagcatctttctgaaagaccagtcccgtgggtgccggccgctctgtggggcctgggtggtgaggatgaggaaggccacggcagtggacaggctggtgggaccccagtttgtgtcactgctgtttctctgccacttccttgtccagagcaggagggcctgctggcaccacccaccaccagttccatttacctttccaagcctgagaccagcccgaccccgctgtggggcagaagagtccagggagaggccaggggctgagaatccccagccctgccagacagtgggggagaaccaggttcacaggcagatgtccctgtaccccctttgtgaaacactcagcacaggtacaagtgaacacccactcactggataccatgggagggactcgggagggcaagggcaggaccagaggggacagcctctggggtcagggttcagaaggagcttcacaggacatttggccaaatgctctcactaaaggggaagtgaggaggcacagggaagagcgcaatccccgtctcccgcagcttatccatgcacttgcaaggctgctgaacatctgctgtgggcctgagcctcacccagcactgctccattcccccagccggcagagcgcgacaacgagcaggtcaccgaacaggaggtggcctggagccccactgaggcagagatcctcctggcagctgggccagggacatccagatccatctcaccgacagcaagattacaaatccagcagagagcctaacccaggtttgccactttctttttaaaatgaattttatttttcagaacagttttaggtttacagaaaaattacaaggataataccaagttcccatatggccccctcccagtttcccctatgggtaccaccgcaagtgagtatgaaatgctggtgacgatgaatgttcccattacctctagtccacgccccagccgcttccttagtctttccctcatgttctttcctgccccaggacctcatccaggatcccacgtgacatttagcagtcacatcccctcaggctcctctcgactatgacagtttcttgtttctcgtgactgtgacggttttgaggactggtcggacatcccgtagactctcgattgggtttgctggagtctgtcacagctggagcgcccttctcgtcacacgatgtcaagggcacaggccgtcaacgtgacttatggctgctggtgctgaccgtgatcactgggccgaggcagtcagtttgccaggtttcttggctgtaaagtgactcccacccctttccacactgccctccgcggaaggaagtcaggacgcccagcccacacttaaggcatggccctgacgtagcagctatagaaatgacgtgcagttagttctgcatggggcgctctctttcctaaagaacaaaaccaaaatcagatcctctagactcgtatttctaataaaactcctcagggctaagagactcagctctggggccctggacaaagtgagaacccagagcaccaagaccgtaggaccaggcccgtgtggagcgaattgggatcgcagcttggagaacaagcaacggagcagtgcagccaggtcaggactgccagggcctctgcaagtgctccagatggcagtgtgaaactggcaggtgtccctgcaccccctttgtgacacactcagcacacgtacaagcgaatacccactcactggacaccacgggagggactcgggatggcaagggcaggaccagaggggacagcctctggggtcagggattcctgtgatatggattcttgaccacgacgccagcctggctgggtttttttcactcctgaacacctgctctcgaagtgctcagcgccttctgcatccgggccccatctttctgctccataaacaagcctggaccacctgcctccttggctgcggcgcctcaggcagcctaagtgctgcttgagaaagtcacacactgatagggactcgagcaccaatgcccgttcctgtgtcctcagccacagccggttcctctcaacacagaaacatggtccctgcttggaccaagtccctgcttcctcatctcccaggtgctgggtgatcctgactggtcccctaggatggtcactgccctggggaccgtttcaggatgtgtcccctgagctttcggcagctcagggtagggcctaccctcttgggacacccctcctccaggatgtggaaaccacaccaggtttccgtctccctggctgtccctcctcaggctcctcactccctgtccattccatggagacccatgggccctgaggacccacctttggcccttgtctctgccacatgctcttcctcaccacacatgcccacacctgccaacatcaccgagggagtcgcacacccctgggctgcccgtcaccttccatggtcaagctcttctctgtcctcaaggagctgacgcattaactgagcacctactatgtgtcaggccctgtgcttggctgggagttagtgatgcatgacagaggacggtcgctgccatcatgaaagccatcacatccctgggggcaagtcagacaacatggtggtgagaaactgacaagcattaagacaggggtcaggagggcccgtcgcagaggagatattttaaacctctgcgtggctgacgtgagcattccagacagaagagcaggtgccaagtctccgaggcagagacaatgccagtgtattcccagaaagtagaggtggcccgtgtggcaagggcctaggaagtggccactggcagcagggcagagccagtgtggagccagcgggctggtgatctaatccagatgggagatgcaggctatgtgcacaggccagggcagtagaggaatgccccacccagaggacaggtagtgggggcaggcccctgatctccctacaggctgagccttgtgagtcaaggcctggcttcatccccagaatctgctctcctctctgtggtaggtgcctggaggcagcaggaaggcaggcaggtgagggatgaaggtgccctggtttccacccgctgggtgaggccatcactggaagggctttgtccagcacctgaccacccacctccacctttgcctccaatagaaacaaatctggacagctttctaagccaccactgactgcccaggcgacacccccaaccaatgaagtcagaaaaggaggaggtgggggggttgccagttggcctcagtggttttaagtcagggtctcagtctgttgccaagactcggctcactgcaacctctgcctcctaggctcaggcgatgctcccacctcagccccccaagtagctgggactagaggggcacgccaccatgcccagctaattttttaattttttgtagagatggggtttcgccatgttgcccaggttggtctcaaactcctgagctcaagcgatcctcccaccttggcctcccaaagtgctgggattataggcgtgcgccaccgcgcccagcctcctcagtggtttttaaagctccctagtgattccagtgcatgaggggcatggggcttcccatggttatgcagaggagaggaggcctccagaggagaagtgcaaacgggcccccaagttactgtttctccaggcagggtccacaagccacctgcaccaggggcatctggagttcaaggcaacaacttggctccctagatacccctaccccatcccgggacccaggatgtcaggcaggtgtgggaatccacatccccaaactccttacagatgctcctcctgcccaccagtggcagagcttgccaaagcccctgcctggagatgggagatcagccctgagacaggaggcctgagggtttgcgagggagcaggaggacagggagccaagctcagaggggcctggctcctgcacaggccgtggtgggcctgcctggtgtcagtgctcggggggcaaacggggcccctgggatgggagatgggatggagagggtgtgggtgggagatacggggaagcaggaaggagactggcagggaggaatgcaggatgcagaacccgggagtgaaatgcagggctgtcccagaggccagtgcatgcccggctctcacttccctcaactggaggaagagcctcctcaccctttctggccacaaggcagggtctgagagtcacatttccccaagtatcctgatgctgctgctggcccagggactgtaccctgaaagctgctgcctggagaagacaaagctgcctctgcggggagcaccatggttgccttactgggcacccatacaccgcccacactgggcaaacactggccagtgctctcgaacttccaaacacatttctccctctctttggatgagggttaagactggagagctgcttccttgtcttatgctgccagacacaatgcttccatccctccatgcttcttgcagctggaagcgccctgacctgacacggggtgcagggctgagggggcgagtgccctgtgggtgaagccctcctctgcaccgtgagggcaggtcccgtgagttctctctttaaaggctcaagggaagacctcactgagagacagagactggaggtggagactgaattaattcagcaataaataagaaacagcaaaggtctgcaaaagaaaagaaacaggcgaaggacaagaagggtattttacaaaagtagtacaaacaaccactaaatagaaacagtgatgaacttcactcgaaataggaatcaccctgatcggatgtcgctcgtccctcacagggtggcaaaggtgagaaatcctgccaaggctagcggatagcagggctggacagaaggaagggtgaactaagcgtcccctagagagcgagttagcgacagggaccaagagcctttaaaaggtgcgctctcccatctgccgcttcaccggcaggaagactttctatggaaataaccagtgagcaaagatttgtgccaggacatttatgtcagcagggctttcaaatatcaacaaatgggaagcagaatactatgcgaccgatgatgatgggatcgcgagatgttcagcgaagtggaaaaatgtccagatacaggaagggaagtttatccacagcctgagagaagagcccattctgtagaagtacgtggctgcttatggccatgaatacgtaaagaaaatcatttggagggacatgtgcccaaaagctaacagcggtatgattgtgggtgattttttgtttgtttgtttctgcttggctcatgcttaagtttttttttctgtgaggagcaaacatgactcatattaagaaaaaagccatcaggctgggaaagtccggaaggacattcctgcagagggaacagtgttcagagaatcacaagcgcccaagagtagagcctgaccggggggtgccgggggggggggagggtgcagcaagtggggagagggggcaggcgcccaggggtgtccctaccctcttgggacaccccctcctccgggatgtggttaaagccttgggcagcggtgtgggctttaacccgaccagagatatacagcaagacagaagccgtgaatggggctgcagcctggtggctccggcatgacaggtcatccatgagggtagagggctgactccttctgatcccccgagggacatatggggccactgtggagagaccagacactggggcagggctgcccaggaaggcagcgggcaggaccaccgggcgctgcagtggcctccttagctggtgtttgtgggtggaacagccaacaaccaaccaacgccatatccccaacatagggaccagggccaggccagccagaaacattccgagtcttgagagcagcacatggggcagtcccttcctcccagccatcatcacgcccctccttcctcccgccaccagtgcccagcccatggctggcactcaaccagtatttgctgaatgatgatctgcactctcccccatccccagcaccactcattcattcattccttccttcactctgcaaacaccgactggctatgtctagggctacggagattaacaaagctcctccctccaggagagatactcatgtgctggaccagaaagctccagctcagtgccaggtggaaaccccacagtgcaggtcggcccaggtgccataggaacccacagcggagcatctgacacttgggccaagggaggcctccttaagcaaacacgaccaggacctgaacggtttgaggaggggagtgacagggtcacatgcgggctgtcaaacaggcccctctgctgcagtgaggacagtggtcttcagggagcataggaggccagttaagaggccaaaacgacagtgcaggccaccagcagtggtgtcctgggctagaatggtggctgaggagagaggggaaagggatggactgaagcaacacccaggaggatgagagccaaggacacgcctagatttctgagcagagctaccaagtggatggtggtgccatcggctaaggtggggacaactggaaacgagtggctggctttagggagagtcaggtcagttaggaatatactgaatttaaggggccgagggcttctggagctcaggacagccttctggtcaaaaaggaggtggcagacagagggcagctgggagccatgaggtgactctgcccaccgtgagtgtcagctttggaagaagaggagaatgacataaccctctgagcataaccctctggcataaccggctgagtcaaaggctggggaaaggcgctaaagacagatggggcatggcctcaggggcagttagacaggtgggaggaggaggtgctcctgaaagccaatgggagaggatgcttctggaaggaggtggagacagggaacaggacagtatgtgggtgggaggccaacacacacagcagtggctctcgctaggggagactctgcctcccaggggacatgcggcaatgtcaggacatttttgggtttcaccactgggatgtcactactgggaccacgtgggtggaggccagggatgctgctcaacaccctgcagtgtccagtgcggcgtccagccctgacatcaggagccacagatgtggaggaactccgagctagaggaagctggaagtctggaaggaattcctttcaagacactcgaagcccaggaaaagtgggcacttggagagcctgaggctcttgggaagccgggaagggaagggaagggaggatcggggctggagagctggagacgctattagttccactgcgaagcgggaggtggtcatcagctgagggtgaagggggtggtcagaggaccgaggagggtaaacacggggaaatggctgctgtggggctcggagacacccgtgttgtgagctgagctaggccagggatcagattcgccggggtgcctgcctggccgggtgagaggctgtcttgggaggctgggagaaagccgttggctggggagaggggtggtgagacctagcgccgtgccccgggccctgccagcgaagaggtttgcccacactggcggcaggctgagcaaagccaggttgcagcatgttctccgtaaagctccagtcacttgaagggctgctaacaagaggctgggccaagatgaaagcccaggcccagccactccacaactcctggtgcgccagttactaactactgtccaaagataagacagggctcacctccgaactgaaataatttccaaattacacttttgcagccttcactgattctcaaaaccagttctctccagactgagccaaatctaggtgttcctttagcatagctcacattcctgtgaaaaccacaagggaacagacaaagaagtcaggttgcaggagaataactgcaaattccatgggaatgcttgcaatatctctggtgctcaggaatatcaaggaaaattcccttccaccagaaagaggaaaaaggtgagaattgttagtggcacaggagaattttaaaacccttctcttatttaggatggtctcctggagcaggagagagatgctggcttctagaacattctaacactgctcaagtttgtatactgtgtaaaatccccattgagaaggcgtttattaaatcagactcttggagttggaaggagagaaggctttcttattcagtgcctgcatctgaagagctaattccctgtagagcggccagacaggctctttgggagtcatgtgggggtcaggtgtcttaaggttactggggaaatgttgaagataaagtgcaatgatgggtacatcaggttcaacacatcactctatgttcatgtatgcctgaaatgtttcataatagaaacttttgttaactttttatttttgagacagagtctcactctgttgcccacactggagtgcagtggcacaatctcagctcattgcaacctccgcctcccaggttcaagtgattctcctgcctcggcctcttgagtagctgggattataggcgtgcgccaccacgcctggctaatttttgaattttagtatagacagggtttcaccatgttggccaggctggtctcgaactcctgacctcaggtgatctgcctgccttgacctcccaaagtgctgggattataggcatgagccaccgtgcccagcattcaacttttaaattagttttttttttttttgagacaaggtctcactatgttgcccaggctaaagtgtagaagacactttagtaccaagtggtacttggtaaggtgcaatctcagctcactgcaacctcaacccccgagactcaagcaattctcctgcctcagcgcccccaaatagccaggaccacagatgcgggccaccacgcccagctaagtttttgtatttttcgtaaagatggggtttcaccatgttgcccaggctggtcttgaacttctgagcaagtgatcctcccacctcgacctcccaaagtgctgggattataggtgtgagccactgtgcccagcctgaagtgagttttcagtatagggaatcacagtccccaaatccagggtggcagacagagccccgagaggactggccgctccttggcttcctaaagcagggcggagacagaaaggaaggcaggggggtaggggtgggtagagggaagaggaggaagaggggccattgggagaggaggaggaggagagctccgcacatggtctgtccgtaattctctcccgagtccttgaagccatgctctcagaatggaggccactctgtaaggaaggccttcacaagtgccaggacctctgcaaacacctacgaggtagggaccaccaggatgtagaagccacaatctccacattccggatggggacacaaaggcttagaagtcccactgtgagggagtggaacagcagggcttttagctgccaggctcctgcccctctgagagttcaagctcagcatggtgcagaagttcaagttgatggtgttgacagtagacagagcagcccaaacataacgaagggctgtccacaaggtcctcggtgttctgctgacctgggcctgaccaagagtgggggcctggacagacaggggcaggcctacctgcacctgccctggacagtacactcgccagggtcccttccacacgtgggacccaatcaatctgcccaggccaagccaggtcaggctgtggttctccagccccttccagctctcagaatgccctgtctctggttccttcctctcctcccactgtcttattttgtacatgctctctgtcttacaatgaatttttcctcttttgggaacttatgtccgatcttatacaagagcaatggacagagtttgaaataaaaatgaaacttcacagccatcgtttcaaggctgtagttatcctgcactgaggaatgccacagagtcacaggcaaaggagacagtgcccaaaggatggccaccaatacccggtttactaaaacgcctccatttctttacctgctactttatcccgaataagttttgcagattcaacttcaccaatgctgctgaacaggcttcgtaactcatcctgggtcatgttctgagggaggtagttgacgatcaaattcgttctcccgatgtcacccctgcagtcttcggccatgtggtcttcataaccattagacattgtatttttcaaaaatctgccaagagaaaaagagcaagtaaattcaaaatgttcatattgcagtatatgaaggcaaaactagtaactgcatttgcacttagagattttctttctttctttttttttttttttgttttgtttttgagacagagtctcactctgtcacccaggctggagtgcagtggcacaatctcggcttactgcaacctctgcgtcccaggttcaagtgattctcctacctcagcctcctgagtagctgggattacaggcgtctgccaccatgcccagctaatttttgtatttttagtagagacggggtttcgtcgtgttggccaggctggtctcaaactcctgaactcaggtgatccacctgcctcggcctcccaaagtgctgggattagaggcatgagccacagcacctggccctgcacttagagattcttttctatgctgcatgttaacttacagccacacaaaaatctgcacatggatgtttacagcggcttcactcataattgccaaaacctggaagcaaccaggatctcctccaatgggtgaatgaatgaacagactccattcatgtggttcagctgcacaggggcatattttttgatgataaaaagaaatgagctattaagctaggaaagacatttaaaggaactttaaatgtatactgttaagtgatacactgtatgattccaactctatgaccttctggaagaggcacactacagagaaaaagatcaatggttgccagcgatgcaggtcggcgtgggggggacaacaaatagtggaacacgggattgtcagggttttagggcagtgaaactattttgcatgatatatagtggtggatgtgacaatacatgtttgtcaaaacccacagaatgaacaatatacagagtgaactctaatctgaattacgtgctttagttactaataatgtgtcaatattgattcaccaagaataacagaggtaccatgtgaatgtgagatgctaataatgggtgtggcggcgccatcacagctcacagcagccaaggctcctgggagatcctcaagcgatcctcacacctcagcctcctgagtagctgggaacgcaggcatgtgccaccacgcccggctgatttttaaaactttttgtagagatggtatcttgcccaggttaattttgaactcctggcctcaagtaatccttccatctcaccctcccaaagtgctaggattacgggcatgagccactgtgtccggcttctttctatttaaaaaaaattttattcagtcaatacttcattgtaatgctacagaacgagtgttctccacaatttttctgtaaacctaaaactgctctaaaaaatagtctatggacacaaaacagaacaactccaagttcactaagagggcttcggagagacctacaaacaattccagcaccacaatttaagatcctgtaaaaaagcctttgggttgtctctcgagagaattccagatttccgattgctttctccccatgtccagagcctgtggggtgtacctgaaccccacccctggacaccctgctgctgagggggcaggtaggcaatggtcctctgcacctgtttattcccaaagacacagtgagtgagctggaaagaggtgagggtttctctaccagtcagaggaacttggtcttcacagtttgcaggctttgaaatgtctttctcagttgctgaagtctttcctttcagtgataaacatcagagccagtgatgactttggagaagagtccagatcaatgcggccaagtatgccgagcccgccctgctgaaagtgcgccgcacactgggctcacttctcagaggcccctcatccctgcctctaaacacacaggtagtcatccctgtggatggccacccgcctggaggtctcggtgagagcccatccctttccccagatccctgttgctcaattctgttatgtttgaacacccagtgcccacggtcatgcgcctttggccttctttaaaaatagccttgccagcagttacataaaaatctgaacacacctctcatgtggagatttcctacctactccctgaatcaacgccgagggaagaattaggtctggtttctttcttcctggtagaaacatccaggtcttccctaccctcctactagtctcagacaatgtggaaaatcagtacaatttcctaacatttcttttatttgaggatgtcctatgctccctgctctttaaaaagtaggttagcatcaaaagccatagaaaaaaagactgaaaagtgagactccatgaaattaaaaacctctgtacagcaaaaggcatcacagacctagacgaagaggagtagcctagagaaaagattcactgcatattctattatttagacctgtggttttcacactgggccattctgcccccaaggggacacagggcaatgtctggagacatttttggttactgtgacttggtcagggccaggggtcgggggagggggtgctactgacacctggtgggtagaagtcagagagctgtaaagcatccttcagggcacaggacggccccacaaccaagaattatctaaccccaaatgtcagtactgccgaggttgggaaaacttgattcggaacatctacaaattggtaagggataaaagaagagacgtaaccaagagggaagtaggcaaaggatgtgagcagcaatttataaaggccttaaattcaaatggctcgtaagtccagaaaaagacactgaacttcatcttcgtgaacaatgaggaaaatgcaaaagaaaaccagatgctattttctgccagtcacatggaataaaatccagcgcaagatcacctgctactgatctgagtatgagatggtagaaccttctgactcacaactgcaggatctttctacagaaataatcacgcaagtgcaggagttcaagaccagtctggacaacaacgtgagaccctgactctcaacaaaaaataaaataatttagtgggcatggtgacccatgcctatagtttcagctactcgggagacaaaggcagggaggatcgcttgagcccaggagatcaaggctgcatgagccatgatggcgccactgcactccagcctgggcaacagagtaagactctgtctcaaaacaaaacaaaacaaaaagtgcaaggaaggcactacctcatggttcataagagtataaaactggatagaattctaaatattcgttaatgggaaatggctaaatttcaactttcagtagcagctcgggacctatagactttaatcatgagaaactccacgtgtctgttacaccatctgtggccacgagattttagaatagatcactggctcaaaaacaaacaaacagacaaaaacatttgctggaagctgatccaaacagaccacaagggttaacactgaagaattaaaatgcacattgaagcttgctcaaaatgtaattcaagcatttcccttctttctttctcttttttcctttacctttccttctcctcgccctttctctaagagttaggcatctactttgctttttccctcattctgctttcatggacggtgagatggacaatggctgtcccaggcttactgtccacagtgtggtatcctctaggtctgggaaaagtggacctcctgaaacacacatcatggcctgtggtacaaatctggcccattgcctgttgttataaataaagttttattggaatacagcttgtctcatttgtttatgtattgtctgtctatagatagttttgtactacaataacacagttaagtagtagcaaccgtatggccaaaaaagctgagaatatttaccatctggctcttcacacaaaaaaaatctgccgacctctgttttaaaatgtaaaaacataaaatttcttggagaaaaatctttgtggcattgggctggggaaagatttctcagacacaacaccaaaagcccacttcgttaaaaaaaaaaaaaaatggataaactggatatcatcaaaatttgaaacttttgctctgtgaaagatactgctaggagaattaaaatccaccaactggagtaaacatttgcaaaagggacttgtagtcagaacacttttttttttttttgagtcaaagtctcactccactgcccaggctgaagtgcaatgccataatcatagctcactgcagccacaaactcttgggttcaagcaatcctcctgcctcagccttctggctaattttttattttttgtcgagatagggtctcactatgttgcccacgctggtcttgaattcctggtgtcaagtgatcctcccatcttggcctctcaaagtattagaattataggcgtaagccacctcacccaacccagaacccttttttttttttttttgaaatggagtcttgctctgtcacccaggctggagtgcagtggcatgatctccgctcactgcaagctccacctcccgggttcatgccattctcctgcctcagcctcccaagtagctgggactacaggcgcccgccaccatgcccagctaattttttgtatttttagtagagacggggtttcaccgtgttagccaggatggtctccatctcctgacctcgtgatctgcccatctgcccacctcggcctcccaaagtgctgggattacaggcgtgagccaccacgcctggcccagaacacttttttttaagctctcaaaacagaagcaggctagtgtgctggctcatgcctggaattccagcactttgggaggccgaggtgggtggatcacctgaggtcaggagtttgagaccagtccggccaacatggtgaaaccccatctctacaaaaatacaacaaaaaaaaaattagcaaggcgtggtggtgggcatctgtaatctcagttactggggaggctgaggcaggagaatcgcttgaacctgggaggcagaggttgcaatgagccgagatggcgccactgtactccaaactgggcgatagggccagactccatctccaaaaaccaaaaacaacataatgagcaaacaacctggtttcaaaaatggcaaaagatttgaacagatactataccaaagaatatatatggatggcagacaggcacatgaaaagatgctcaacatcattagtcaaattaaaaccacatcgagacaccgctacccacttattagaatggctaaagcaaaataaaacaaaaaacaaccaacagcaacaaaacagacaatgtcaagtgctggcagggatgtggagaagccagaatattcatgcactgctggtgggaatgcaaaaatgtgaaatgtgacagccactttggaaaacagattggcagtttcttatggtgaaatatacacttagcatgggatccagcaatcctactcctagtattaaggcaatagaaaggaaaatctatattcacacaaaaatctgtatataaatgtgcagagcggcattattcataatcatccaaaactacaacaacccaaatattcttcaagccattcatggataaactgggatacaccatacaacagaataccacctggcaataaaaggtatcaccaattcatgctacttgtgtgaatctcaaacacatcttgccacatcatttctgtgccttcctggaaaaggcaaaaccatagggatggatctgtggtcgctggggttagggagtgaggggaaaagtcgattacacagggacaggaggagggagtatttctgtttgtgggagagcgaactttccaatctttattatggtggtaatcaaacaactttatccgtttgtcaaaactcagagaactctactcgaaaaaatgaattttcctacatgcaaatttaaaaataaattgtctgagtgtggcgactcatgcctttaatcccagcgctttcagaggccaaggtgggaggactgcttaagcctggagttcaagaccagcctgggcagcacagagagatgccatcattacaaaaaaaaaaaaaattaaaaattacccaggaatggtgatgcacacctgtatgcaatcccagctaatcggggggctcagctgggaggatcactagagcctgggaggtcaatactgcagttagctatgattgtgccactgcagtccagcgtgggcgacagagtgagatcctgcctcaaaaacaacaacaaaaccacaataaaaataaattttaaaaggtttaaaaagagaacttctgctttgcggccctgttcctcctgacactctgagtcaaggctgagcagcccctgcaggtcaagttcttggtcaactagtaacacgggagaaaccaacaacctgccctgcaaagcagtttcatgacgtttctgggcccccaccccactctctggaggcccttcccttgaccttctccaaatctgcatcatcaatcctgggccaaatcagcttctatcccacaagctccaaccacaactgggccttgtcaccactcaattatcactgactcccaagtcgtagccacttctgtctctcgaggtgcaaggcctgcactgtcctgcaatcaagatgctcacccctctggtattccctgtcagtggtcaccacccattgaggctcggcggtcacacgatgatgctcacggtcaggcatgccattaataagtggcagggccaggcctcaagttgtcatgacaatgcaactgtcaaactggcaaggcccttcacaatcggacccaggtggttctccagcctcagtcgccaccctcccttcccgctcactccagcttcttgccaatatgctacaggcctctgctttggctgttccctctgcagggcactagtgtcctctccttcacttcccagctcattttttaaaattagtatttttttttaaagagatgggggtctctctttgttgcccaggctggtcttgaactcccaagctcaagtgatcctcctactttggcctcccaaagtgctggaattgcaggtgtgagccaccatgcctggcctcccagctcacttctatttttacttatttttcttttgagaaagggtcttgctctgctgccaaactagagtgcagtggcataatcacggctcactgcagcctcaaactgcctcagtttcccaagtagctgggactactggtgtgtgccaccatacctggctgatttttaaatttttttagagacaggggtctcattttgttgcccatgctggcttcaagtcatcctcccacctgggcctcccaaagtgctgggattataggtgagagccactacaccaggctggctcatctttaaaaagctaccttcctggcctggcgtggtggcttatgcctgtaatcccagcaatgtgggaggccgaggtaggcggatcacctgaggtcaggagtttgagaccagcatggccaacatagtgaaaccctgtctatactgaaaatacaaaaattagctgggcgtgatggtgcatgcctgtagtaccagctactcaggaggctgagacagcagactcacttgaacgcgggaggcagaggttgcagtgagtcaaaatcacgccactgcactccagcctgggcaacagagtgagactgtctcaaaaaaataaaaaataaaaggccaccttcccccaggacaacaggttacttactctagttctcagtgcctccatgccattgctgtaaacctttgttactgtcccaaccactcctatcattatttgccttacactcaatgaccaatgtcagtggtgagaaccttgagggcccaggttataccattgccatctaagagtccccaggcaaagccagggtgtgtcacacagcagtacaggaggctgctggctctcagaccaggctggagtgcagaggcatgatcacggctcactgcagccccggcctcctaggctcaggtgatcctcccacctaagcctcccaagtacctaggactgcaggtgcgtgtcactacgtagtcctactaagtcctctatgtagttctgtctaagcttttttatgttttgcagagaggggggtcttgctttgtcacccaggctggagtgcagtggtgcgatcttggctcactgcaacctccgcctcctaggttcaagtgattctccggcttcagcctcccgagtagctgagattacaggcacctgccaccacgcccggctaatttttgtatttttagtagagacagggtttcactacgttggccaggctgctctggcactcctgacctcaggtgatccacccgccttggcctcccaaagtgctgggattacaagcatgagccaccacgcttggccgcttttttatgttttgtagaggcgggggcgggggggtgtctcgccatgttgttcaggctggtctttaactcctgacgtcaagtgatcctcctacctcagcctcccaagcactgggcttagaggtgagagtcaccgtcggtgcctggcctctgggagaagtcttgtttggatgatctctgaaggtttttgactccaatgcactattttaaacaatcctggttgtctatgtgacatcagtgatgttgttcacatccgtcgatcatctagcgcatatccaggggagagagatgtgtgtgtctttatgtgtgacagaaaaagagtgaagcagtgaggctgctttccaccaggcaagcatgagaatcactttcattgcaccatgacggagcaggtattctaaaccacttgagccagagcaaaactagaacagtcaaatctatcttcaggctcaatcttgacacttcacacatcatctgacagggcttggacccaataatgtttaaggtcctttccagatgcaacattctgagtcttccaggtaaaaaaggcttaggtcattcaggaaatgctctgctgccagaaaaaacccaaagcaccacctgacccagttataaatgccatgcaaggcaaggtctcaggtggacatggcaccagcttcttccaagcccctgcccatggcccacagaagggcaggatgcctggctggagcagctccagctaagtgacaattccctttcagccaggctgagaagcccggggcaggagcaggtcaggtgtggctggcctgtggcccagtccaggcaccccacagccctgctaagggctctggcttctttctggctggtcaaggccaaaggccactgcagggatctcacacagaagtgcaaagcaacagggcatggcaggaaaaaaccctgagctctggagcctggcaggcccgagctgggcactaagtctcctgctcatcagctgaactactgtgcagaagtcgctccccttcccagagcttcagcttcctccactggggatgtcaccccttgctccacagtgcctggtacagtgagtacctgtctctagtcccacttcatgaacaaaatcaaggcgaatgtatgtctccccaacctccctgtctgcagctacaaacaccttcatctcctctcctcctgtccttgccctctcttcaaaccgcctccgccccctgaattacttcatttggtggcatagccccacctgtcccccaagccacctctctctagcccttggacctaatcaagcaccatgtcctgccagtttgacatgtgagatctctcaccgtcctgccacctctctgccaccatccctattcagattcctgtcacctcctgctagaccgactcctaagtgggattgcaaactcagtgtctctaaacccagcttcatcttcttcctcctagtcactccccttccttgagtctgcctgtttctgttcatggtgacatgagtctggccatcgagctgttcaggattgttccctctcctgtgattccttcccctgacataaacgtctcactcttaaaaaaaattttttttttttttagagatgggatctcgctatgttgcccaggctggtcttgaactcctggccttgagcaatcttccaccttggcctcccaagctgttggggttacaggtgtgagccactacacccagccacagatgtctgtttgacaggtacctggatccagtcgcttctgagtagtctgccaatctttcctttccctggcacagacaaaatatcaaccacgtgccaggcacagagcaaagcatcaggcatacaaaatatagaagcagtcccagtcctgaccctcaagcggttcagccattacggggccacctcagtactgcaacagcctgtgactggtttctccttgtctccccccagcctctccaccagggtgagcagtgaactaaaactgctcagtagccacccctggcctacctgcagggtaacagccaagccctctgcccagtggacacctgagcactcctgccaccactacccatctcagccttcttgtccctaaagaacccacgtggttctttgaacacacgatgttctctgaacactgcgatgttcccacctccgggcttggctgtatcctaaaaagccccaccctattgtctttgcctggttagctcctccccaccgctactgcctcctctcctccaggaagcattctgggctctcctgtgcccacccaggtcccttttctgggcttccacatcagccagggcataattctcacagcactcatcagagtgggctgagatgacctacacacatcatgcacactctccagagcctagcgggggcccaggacacagcagcggagcagggagagtcgttcagaggagggagcgagcctcacttccctcccacaggctggcttccgttggtcttcccctgacccacagctcgggtcggccgcaccgcctcgctactgccacctaggggcgccagccgggcgctgcgcttctctcgccattcagccttgaattcgattcaataaactgaatgggatgggaacactaaggagggaacagttgattccggtgcgggtggaggaagagtggcagtcagacgaggcttcaaacggccagtgagctctgggctgagccatggagcataagcaaaggatctccaggtggaagagatctgtctccaggtggaggctgcaacaggcagggagggttagagtttggggtctacgtgcaggggcggggagggttagggtgtgaaggaactggcactccaaactaagggcttctagctttatcttttaagccaccagagaggtcaagaaaacgtgtcttttttctgcacaaagattttaaatcagaagggatacaattagatgtgcatttacagaacagaactcctgctggagtgtggaaagagggaagagatgggaagcggagagtgagagaggcaagaaattttcataaagttttttcataattctctcatttcttttacttgaaatagcaccatgggctgggcgcggtggctcacacctgtaatcccaggactttaggaggccaaggcgggtggatcacctgaggtcaggagttcgagaccagcctgctcaacaaggcgaaatcccacctctactaaaaatgcaaaaaattagctggacgtggtggcggctgcctgtaatcccagctacttgggaggctgaggttgcagtgagctgagatggcacaactgcactccagcctgggcaacaagggtgaaactgtctcaaaaaaaaaaaaaaaaaaagaaaaagaaaaaaaaaaaaaaagaaatagcaccatggtccgggcgcggtggctcacgcctgtaatcccagcactttgggaggccgaggcgggcggatcacaaggtcaggagatcgagaccatcctggctaacacggtgaaaccccgtctctactaaaagtacaaaaaattagtcgggcgtggtagccggcgcctgtagtcccagctactcgggaggctgaggcagaagaatggcgtgaacccgggaggcggagcttgcagtgagccgagatcgcaccactgcactccagcctgggcggcagagtgagactccgtctcaaaaaaaaaaaaaaaaaagaaatagcaccatgatctcagactcaacacatccagactgaaactctgtctgctcaaaaccaatgcatcaacataaacagtattatttccttccacatttgagacgttcgtgtatctcaacctctttgtgggcctcgaagttgcagaatttgataatagatcccagcacagaactttgcacacagaaaatattcgatgacaactggagtgccctggagccttgtgattataggagcagtacaatcgagtggttaagagtaagggttttgaatcagagggcccgagttcaaaccctggcgcagccactttagtgcatgagactggtcacatcaagtgacccatctaagcctcagtttcttcatctctaaaatggaaattaatggaaattataacatcacctgcctcaaggactgcagacaaacgtccacaaagtgtcaagcacatagtaaatcctcaataaatactggtggctatgtacaacatcatttattcagtgcctaccaggcacagaccacgcacaacgcaacgggatttccaccctcttcaatttgcaccacacttttgtccttcccattttatagataagaaaactaaggctcaacagagtcaagcttgttcgaggtcttgggagcatctcccagggcattagaacttttggaggaagagcatttagttcagtaatggttctcacctgtgcgtgtgagagtggaagagacccctcccccgcaacccgagccatctggcaatgtttggagatacttttgatcctcacgacttggagcatggggatactgctggcatctagtgggtagaggccaggaatacggctcaacttcctacattgcacagggaagcccccactaccaccacaaccaaaaactatctgaccccaaacatcagtagggccaacgtcgagaaaccctgctctagacagatcattctcctcatcttcccatttctggccatccggatcttagatgaacactttctagcaagggggctcagtcccaccacgggaagcccatgcagaagttgtgcagaagttcttctccacctgccctgcacacagtagggaccaaaacccattttaacaagccccgcagcccagagcaccggaaaaggaaggaagggcatccatcccccattgttcaactgtgtgcagcttgtgtttccaacaggcacacacacatattttacaaatcctaacgtcccacgccccacaaacagctttgttagagatggcgctcaaaaaaagatgcagtttagattttttttttcccccaggactcccgtgtatctactgaagggtttgcacacttctcaaaggacctcgcaccggccgcggtgctctgacaacgaccacaaaagaatctgtgggatttcccgggggagcaagcccgtgggccgtgacctctgcgcgctcaaagcgttcccggcgctcccccgtagctggccccactctcccgcccccggagcccgggcttccaaggcgaccggggcccccggccgtgcagcccggccccccggcgcatgcccacgccgtatccccctcgcccgtccctcgaggcgccagaggaatccggccccggggcctgtagccggcgcccacaccggcccgccccgacccgcccgccgcggccccagcgcgcgtcccctcccccggtccggcgcggcctgggcctcggccggtgcaggcccgcgggcgccccgcggccaggccaggcgagctcaggcctgccgcggcctaccccgtcgggcgccgccgaaggccccccaccgcctcacctggatgcgggcgggcgggcccggggctgctccggggcgggcgggaggcggcggcggcgcggcgctaacggctccgctcggcctcggtagcggtggcggcggtggcggcgacggcgacggcggcagcggctcctcctcagcgcgcacgacccgctccggcccgcggcccggacacgccccccccgcgcgcgagcccattggccgacgtccgccacggcgcgctgctcattggccggcgtagctgtcgcggcgctccggggcgcgcgggagaggcgggacttccggtcggcgccgcctgcgaagtgctccgcggccggcggagacgcgggcagccagcgatggccgcggagggggcgaactgggttccggccctcggaggctgacggaaggcggtggctgaggagcggcgcctctggttgagcgctcgccgtgtgtcccgcacctgtctgtcctgccgccgcccggtaaggtaggaaaggtcagcgcgccggggttacgggtacagaacctgggttcgaatcccggccccgacgtttccgcactacgtgccgttgggcaggagctgacgtcaccttgccgggcctcagtttccttctctggtgcgctgaggaggcggggcatggaacgtggtcagcgcttcatcggtgctggctctttgagcaagccagttcccgaaggctcagcatctcattcattcattaaaatgtcattgagcgcctactgtgtgtcaatcactgtatgggcagtgagcagaaaaaaaatacctggtcttattgggctaacattctaaaccagcgctggcctagaatgccctagtagaaatacatgcaagctacatgtttaatttttttttatgtaaagatgggctctggttctgttgcccaggctggtctcgaactcctggactcaagcgattctcctgcctccgcctcccaaagagctgggattacaggcatgcctgcactctgcctaattttttcttttttttttttatgatctgaaaataatagtctttttatttttatttatttatttatttatttgagacggagactcgctctgtcgccaggctggagtgcagtggcgtgatctccgctcactgcaacctccgcttcccaggttcaagcgattctcctgcctcagcctcctaagtagttgggcctacaggcgctgcgccaccacaaccagctaatttttgtatttttagtagagacggggtttcaccgtgttggccatgatgatctgtatctcttgacctcgtgatctgcccgcctcagcctcccaaagtgctgggattacaggcttgagccactgcgcctggcctacaattttgtttttctttttttttttttttttttgagacaggatctcactctgtcacccaatttggagtgcggtggtatgatcacagctaactgcagcctcaacttccccagctcaggcaatcaatcctccggcttcagattcctgagtagcttagactacaggatgtgccactatgcctggctaatgttttatttttttgtagcgatgaggtcttgctgtattgcctaggctggtctcaaacttctagacttaagtgatcctcctgctttggcctcccaaagtgttgggattacaggcgggagccacggtgcccagcctgtttctttttttaatcatattttcttagaagttttttttttttttttttttttttttggagacagggtctcactctgctgtgcaggctggaatgcagtggtgtgatctcagctcactgcaacctctgcctccctattcaagtgattctcgtgcctcagcctcccaagtagctgggatcacaggcgtgcaacatcacacccagctaattcttgtggttttagtagagatggggttttgccatgttggccaggctggtctcaaactcctggcctcaagtgatccacccacctcggcctcccaaagtgctgggattacaggcatgagccaccacccggcctaggaaagctttttagagattgggtctcactgtgttgcccaggctggagtgcagtggctgttcacaggtgcaatcatcccacaggtttaactcctgacctcaagcagtccttctgcctcaggctcccaagtagctgggattataggcacgtgccaccacacctagctcaattaaatgttaaatttaacatttaattgttaaattttatagtagccagcattctgggtcatcacggtgcaatagaagtataaacaaagcaggccaggcacagtaggtcacgcctgtaatcccagcactttgggaggccgaggcgggcagatcaccaggtcagtagttcgagaccagcctggccaacatgttgaaaccccagtctctactaaaaatacaaaaattagctggacgtggtggcaggagcctgtaatcccagctactcgggaggctgaggcaggagaatcgcttgaaactggaaagtggaggttgcagtgagccgagatcccgccactgcactccagcctaggtgaaagagggaaattacatctcaaaaaaacagtataagcaagccacagatttgtcagcgaggtatgtaatttaaattggtacattgttagccatgtttaaaaataagtaaaaagaaacgggtgatgttagttgtaatgtgttttatttaactcagtaggttgaatatgttattatttaaacatgtagtcaatattttaaaatacaggatgttttgcatctgttatctttccaaaatagaagatactttgtgtcctttttctttcctgcatgctttttttttcttatttttttgagacagagtctcactctgttgccaaggctggagtgcagtggcgggatctcggctaactgcaacctccccatcccgggttcaagcgattctcctgcctcagcctcccgagtagctgcgattacagacatttgccaccatgcccgggtaattttttgtgtttttagtagagacagagtttcaccatgttgcccaggctggcctcgaactccttaccttaagtgatccacccgccctggcctcccatagtgctgggattacaggcgtgagccaccgcgcctggcccctgcctgcttttgaaatctagtatgtatcttatactccacagcacagcacagcaccgcacatctccagtcggactggctacatttcaagggctcaaccatcacgcgttaccagtggctactgcatcagactgtgcagtgctagatggggagtcagaagagaaaccaagtgatttccatgtcaagtggtgaacaggctaagaagaaaagtaaattggggaaagagcatggggaatgtgggggttgctgtttgaaagaggatggttgggaaggctgaagagctgtcattcgcagagggacccaaaagaggtgagagcactgaacaaatagttacattcttcattgtctgccgcagtgctgtccagaagagcttcccacgataatgggcatgttccatatcagcaccgtccaattcagtagcccctggctccatggggttttctctctttgtttttttctgtttgtttttttttttaagacagagtctcactcttttgccaaggctggagtgcagtggtgtgatcttagctcacagcaacctctgcctcctgggtttaagcgattcttctgcctcagcctcctgagtagctggaactacaggcatgcaccaccacgcctggctaatgtttatatatatattttttgctttgttttgttttgttttgagatggagtcttgttctgtcgtccaggctggagtgcagtggtgtgatctcggctcactgcgagctccatctccctggttcacgccattctcctgcctcagcctcccgagtagctgggaatacaggcgcccaccaccacacccggctaattttttcatgtatttttagtagagacggggtttcactgtgttagccaagatggtctctatctcctgacctcgtgatctgcctgccttggcctcccaaagtgctgggattacaggcgtgagctgcagcgtccgacctatatttatatttttatttattattattattattattattattattattattattattattattattttgagatgaaatattgcactgtcgcccaggctggagtgcagtggtttgatctcggctcactgcaacctccgcctcctgggttcaagtgattcttgtgcctcagcctcccaagtagctgggaccgcctgctaccacacctggctaatttttttgtatttttagtggaaacaggatttcatcatgttgaccaggtcagtattgaactcccaacttcaggtgatccaccaacctcggcctcccaaagtgctgggcttacaggcatgagctgttgcacctggcctccatgtgtgttttgtagggttttttttttttttttgcacttggcacatggttggtaccattaaagaactgactttctggccagacaacggtggctcatgcctgtaatctccagcactttgggaagccaaagtgggaggataacttgaggccaggagttcaagaccagcctgggcaacatagcaagcccccatctctaccaaaaataaaaaaataagccaggtgatatggtgtgggcctttagtctcagctgcttgaaaggctgagttgagaggattcctcaagcccaggagttcgagactgcattgagttgtgatcatgccacaacatttcagcctgggcaacagagcaaaaccccatgtcaaaaaaaaaaaaaaaaactgagcgtaagtttttaattaattcaaatttaaataaccatatagggctagtcgctcctatagtggacagcatagggttggtatagtgttgacaagtcctctgaattaagtgggtccttcatggcaaatgctttatggacatcctcctgtgaaatcctagaaataggccaggtgtggtggctcacgcttataatcccagcactttgggaagccgaggcgggcagatcacgaggtcagcagttcaagacaagcctagccaacatagagaaaccccatctctactaaaaatagaaaaattagccaggcatggtagtgggcgcctgtaatcccagctactcgggaggctaaggcaggagaatcgcttgaacctgggaggtggaggttgcagtgaaacgagatcacgccactgcactccaacctgggcaacaaaagccaaactccatatcaaaaaaaaaaaaaaaagggaaaaggaaacgttttaaactgagattggggtgatgggcaacagagtgagactctgtctcaaaaaaaaaaagaccttattttttagaaaaatttagacccagcacagtggttcacacctgtaatcccagcactttgggaggctgaggcagcaggatctcttgaggccgggagtttgagaccaacccaggtaatatagcaagacccccatctctagtaaaaatttaaaaaatttgctgggtgtggtggcacacacctgtgctcccagctactggggaggctgaggtgggaggattggttaagcctgggaggtcaaggctacagtgagctgtgattgcaccactgccctctattctgggtgacagagtgtgaccctatctcaaaaaaaaaaaaaaaaaaaaagaaaaaagaaaaattttagatttacagaaatacttccaaagtagtagtagagagttaccaggcctggtgcagtggcaggtacttataatcccagctacttgggaggctaaagtgggaggatctctgagcccaggagttgcagaccagcctgggcaacatagccagaccctgtcctttttttttttttttttcttttttttttgagaccgactctcactctatcgcccaggctggagtgcagtggtgtgatcttggctcactcctatctgcgtcttctgggttcaagcgattctcctgcctcagcctcccgagtagctgggattacatgcgcccaccaccatacccagctaatttttgtatttttaatagagatgggttttcactgtgttggccaggttggtctccaactcctgacctcaggtgattcacctgccttggcctcccagagtgctgggattacaggcgtgagccaccagaccctgtgttaaaaacaaacaaaaaaacagagttaccattattctctattagtaacatattttagttacaaatgagtaacatattggtaacaaattaataatgataatttgttgcagttaatggaccaatactgatactttgctattaactgaaggtcagagtttatttagtcttcctttgtgttgccctagtatcttttttctctcccaggatcccacccaggagactatctcactttttttttttttgagacagagtctcgctctgtcacccaggctggagcgcagtggcgcgatctcggcttactgcagccttcacctcctgggttcaagtgatcctcccgtttcagcctcctaagtagctcggacttcaggcacctgccatcatgcgtggctaatttttgtatttttagtagagacggggtttcgccatgttggccaggctggtcttgaactcctgacctcaagtgatccacctgctcggcctcccaatgtgctgggattacaggcatgagccactgcgcctggccagtccatctcacttttagttctcttatctcattaggctcttcttggctatgacagattctcagatttccctagtttttgatgatcttgacagttttgaggagtgccggtcaggtattttggtaagagtgtccctcttttggaatttatctggagtttttctcataagatacacgtttttggcagcaagatcaaggtaataaagtatcaatttaatcacaccatatcaaggatacatcctatcaaatttattatttatttatttaaagagacagggtcccggccgggcactgtggcttacgcctctaatcctagccctttgggagacagaggcaggtggatcacttgaggtcaggagttcgagaccagcctggccaacatggtgaaaccctatctctactaaaaaagtataaaaattagctggatgtggtggtacacacctgtagtcccagctgctctggaggctgacgcatgagaattgcttgaacctgggaggcggaggttgcagtgagccaagattgtgccactacactccagcgtggggattacaggtgtgcaccaccatgcctagctaattttgtatttttcagtagtgacggggtttcaccatgttggccaggctggtgttgaactcctgacctcaggtgatccacccgtcttgttctcccaaagtgctgggattagaggcatgagccaccgtgcccagtccttttttttttttttttttttttttttttttttaatactgtggaaggaagtcactatgcgtagcccacacctaagttgtggaaggttatactctatttatttaagggtagactgtctacataaattttttttaattttagagacagagtcttgctgtgttgcccaggctggagtgcagtggtgtgatcatggctcactgcagcctcaacttcctaggctcaagagatccttccacctcagcctctctagtagctgggactacaggtgcacgtgatcacatctggctactttttgtatttttttgtagagctgggatctcactatgttgttcaggctagtctggaactcctggcctcaagcactcctcctgccttggcctcccaaagttctagggttatgatttgcatcgctacatctggccctacataaattattattattttttaagcttgtccacagctgaaacataagttttctagaatccttccacgtgggagatttatctcgctctcccccacttactaggtcattgaattatatcaggatggaatgctggatatttatttatttatttattttactctggagatggagttttgcccttgttgcccaggctggagtacaatggcatgatctcggctcaccacaacctccacctcctgggttcaagcgattctcctgcctcagcctcccaagtagctgggattacaggcatgtgccaccatgcccggctaatttggtatttttagtagagatgggatttctccatgttggtcaggctggtctcgaactcccgacctcagatgatccgcctgccttggcctcccaaggcagtgattaccgggattaccggcatgagccactgtacctggcctggatgtttattttatgctttgtgttataacccaatactactgtattttgtcggtcaaattgttccagctttggccgtctaccactctttaatttggctcctgtggccctttgacatatccccatcaatgtgtttttcagtggtttttttgtttgttcgttttattcgaagcagttccttaaactttgtggcaacacaaaatgctgcaggcctatcttgtgtatttctgcccttcgtcctagaagcagccatgtctccaagggggccctggttccttttagtagagaatgatattgaaaaccaggatctggggtactggaagtgctcattgctactggaatgttgtttctttagatctttagatcaccaatagcttttttgtttgtttttttgagacggagtctcgcattctcgcctagcctggagggcagtggcgcgatcttggctcactgcaagctctgcctcccgggttcacggcattctcctgcctcagcctcccgagtagttgggactacaggcgcccgccaccacgcctggttaattgttttgtatttttagtagagacggggtttcaccatgttagccaggatggtctcgatctcctgaccttgtgatccacccgcctcggcctcccgaagtgctgggattacaggcgtgagccactgtgcctggcctttttttttttttttttttttaagacagggtctcactatgttgtccaggctggaatgcagtggtgccatcttggctcactgcagcctcaacctcctgggctcaagccatcctcccacctcaacgtcccaagtagctgggactgcaggtgtgtgccactgtgcccacctaaatttttgtattttttgtagagacagggttttaccatgttgcccagcctggtctctaactcctgagctcaactgatccactcaccttggtctcctgaagtgctgggattacaggcgtgagccaccaaacccagcatcaatagctcttttcttttctttttcttttttttttttgtttttgtgaaagggtctgcactcaccagcagtgtgaccttgggcgagtcatttaatctctctgagttttagcttcctcatctctaaaatgggggtgggccagatgtggtggctcatacctgtactcccagcactttgggaggctgaagtgggcagatcatttgaggctaagagttcaagaccagcctggccaatatggtaaaaccccatctctactaaaaatacaaaaattagccaggcatggtggtacacacctgtaatcccagctattctggaggctgaggcaggagaatcacttgaacctgagagggagaggttgcagtaagccgagatggcgccactgcactccagtctgggcaacagagtgagactctgtttccaataaataaaaataaaataaggccggtgtggtggctcacgcctgtaatcccagcacattggaggcaaaggcaggcagatcatctgaggttgggagttcgagaccagcctgaccaacatggagaaaccctgtctctactaaaaatacaaaattagctgggcgtggtggcgggtgcctgtaatcccagctcctcgggaggctgaggctggagaattgcttgaacccaggaggcagaggttgcggtgagccgaggtcgcaccattacactccagcctgggagacaagagtgaaactccgtctcaaaaaataaaataaataaaatgggggtgatcacagtacaggtgatccttgaacaacctgggtctgaactgcacaggtccacttacagctggatttacttccacctctgccacctgtgagacagcgagaccaacccctcctcctcctcttcctagcctactccgagtgaagatgatgaagatgaagaccgttatgatccacttccacttaatgaaagatgaatatattttctcttcctaatgatttttttttttttttttttggagacagagtctcgctgcatcccccaggctggagtacagtggtatgatcttggctcactgcaacctctgcctcctaggttcaagtgattctcctgcctcagtctcccgagtagctgggattacaggcgcccaccaccatgcccggctaatttttgtatttttagtagagatggggtttcactatgttggccaggctggtctcaaactcctgacctcaggtgatctgcctgacttggcctcccaaagtgctgggattacaggcatgagccaccttgcctggcctcttcctaatgattttttaaagtacatcttgttttctctgtcttactttatcataaaaatatatgatacaaataaaatacagaatatgtgttaatggactgtgtatgttatgagtaagccttccagtcgacagtgggctattattggtggttaagttttgggggagtgtgtgttcaagggtcaaccgcacttcctgagggcactgtgagaactaagttaaataacccacttttacaatctttggaaccgggggcaggtggctggggctcacacctgtaattacagcactttgggaggctgaggcaggaagatcccttgaggccaagagtttgagaccagcctgggcaacaaagcaagactctgtctctacaaaaatttttaaaacttaaccaggcagctgggcgcggtggctcacgcctgtaatcccagcacttcgggaggccgaggcgggaggatcacaaggtcaggagatcgagaccatcctggctaacatggtgaaaccccgtctctactaaaaatacaaaaaattagccgggcatggcagcatgcgccggtagtcccagctgctggggaggctgaggcaggagaatggtgtgaacccgggaggcggagcttgcagtgagccgagatcgtgccactgtactccagcctgggcgacagagcgagactccatctcaaaaaaaaaaaaaacttaaccaggcgtgctggcatgtgcctgttgtccagctagtcaggtggctgaggtgggaggatcccttgagctcagaagtttgaggttgccatgagccgtgatcgtgccactgcactccagcctgggtgacagcaagaccctgtctctaaaaaaaattttctaaaaaaacaaaacccaggtctgcttggtctcaaagatctttatttgcctgctctgattgtgagataggaagttcttatctgattttgcccttttatttatttatttttttttgagatggagtctgtctctgtcatccaggctagagtgcagtggcacaatcttggctcactgcaacctccgctgatagcagattacacttttatttttagttttttatgagatggagttttgcttttgtcgcccaggctggagtgcaatggcaagatctcggcttactgcaacctccgcctcccgggttcaagcaattcttctgcctcaggctcccaagtagctgggattacaggtgcgcaccaccatgctcagctaatttttttgtatttttagtagagacagggttttgccatgttggccaggctagtctcgaactcctgacctcaagtgatccacccgccttggcctcccaaagtgctgggattacaggcatgagccaccacatctggctctgttttgctttttttttttttttaaatgagaagcatagtcttgatcctggggagtaggaatcggccacggtagttcggggtactcttgctgtccctctcagtccctgtctgttccttcagcacaagctattgtgagtccaggaggtcaggagacagagaagctgactgagcccaagtccctgttctagaggacatcactgccctgaggcaacgatggacacgtggacacataaatccacccaacgtgacaagggacgggcacagatcggcctcccatggagggcagtgttggggccacattaatccatgaggaagggtcggctaggcagagaagagaggtggggagttccagacagagggaccgacaggagtaacggcacaaatttgtcagggaggatcattcagggagcaggggtgccggttcggaggggagatcacagtgaggtggcactggccttgaggagccctggaaagtcgggcagagaagatctgatgtgatcccatagcccacgtagtcagcccacaacagcccgattcagcccatgcctgttttccggcggcccgtgagccaagaatgatttttccacagttggaaaaataacagtagcgttttgtgacatgtgaaaattacatgaaatgcaagtttcagcgtccataaagtttgacagtaacacagccacgcctctcctttgtgtgtggccaggggacgctcttgagctgtcatagaggcggaagtggtgcacaggacgcgcttcatggatgtgcacactgcctcacacggggccctgcccttccactgtccctgttctgaagttctttatgattgaagggccccaggtttttattttgcatcagaccatgcacattatgtcatgtagggtacacagcaacagagaccgtgtgccctagaaagccccgagtatttgctgtgaagcccttttcagaaaacactggtggatcccccgcagagacttccatgtcctgataccctggaacccatgaatatggtacctcacacggcaggcttaagggtctttttttttttctttaagagatagggtcttgctctgtcacccaggctggagtgcagtggcacgatcacagttcactacagcctcaaaacttttagtctcaagtgatccgcctggcttagcctcctgagtagctggggctacagacataatgcccagctaattaaaaaaaaaaaaaaatagagatggggtctcactatgttgcccaagctggttttattgaactcctggcctcaagtgatactcccaactcagcctcccagtgttgggattacaggcatgagccaccgtgcccaacctggttgaagattttgagatgggccaggcatggtggctcatgcctataatcccagcactttgggaggctgaggcgggcggatcatctgaggccaggagtttgagaccagcctggccaacatggtgaaaccctgtctctactaaaaatacaaaaattggccaggtgtggtggcacacgcctgtagtcccagctacttgggaggctgaggttgccgtgagccaaggtcgcaccactgcacttcagcctgggcaacagagtaagactccatctcaaaaaaaaaaaaaaaaaaaagagatgggagatcattctggatgatgtgggtgacccaatggcatcacagggtccttataagagggaggcaggatggtcagaatcagagattggaagaggctgcactgctggcttgaaggtggaggaaagggccacaagccaaggaattcaggcggcctctagacgttggaaaatgcagggaaatggattctcccttggagcctctagaaggaaccagccctgcgcacaccttgattttagaacctagtaagaactaatttcagacttctgaccccaggattgtaagataataaaaatgtgctgctttgggctggatgcggtggcttatatatgtaattccagcatttttgggaggctgaggtggacagattgcttgagctcaggagtttgagactagcctgggcaatggtgaaaccccatctgtacaaaaaataaaattagctgggcgtggtggcatgtgcctctagtcttagctacttgggagactaaggtgggaagatcaactgagcccagaaggctgaggctgcagtgagccatgatcgcaccacagcattccagcctgggcgacagagtgaggccctgtctaaaattaaaataaatagctgggcacggtggctgacgcctgtaatcctagcactttgggaggctgaggcgggcagatcacgaggtcaggagatcaagaccatcctggctaacacagtgaaaccccgtctctactaaaaatacaaaaaattagcggggcgtggtggtgggcgcctgtagtcccagctactcaggctgaggcaggagaatggcgtgaacccgggaggtggagcttgcagtgagccgagattgcgccactgcactgcagcctgggcaacagagcgagactcccatctcaaaaacaaaaaaaaaccaccaccaccaccaacaacaacaaaattaaaataaataaaataaaatagttgttttaagtcaccagggttgtggttatttgttacagtagccgcaaggaactaaaagggggtgggcattgaaaatttattggccgggcgcggtggatcacgcctgtaatcccagcactttgggaggctgaggtgggcagatcacttgaggtcaggagttcaagaccagcctggccaacatggtgaaaccccatctctactaaaaatacaaaaattagccgggcttggtggcgggcgcctgtaattccagctactctcaggaggctgaggcaggagaatcgcttgaacccgggaagtggaggttgcagtgagctgagaccatgccactgcattccaacctgggcaacaagagtgaaactccatctcaaacaatatatataaaaatacaaatacaagtacaaaaattagccgggcatggtggcacatgcctgtaatcccagctacttgggaggctgaggcaggagaaaggcaggagaatcgcttggacccaggagtcggaggttgctgtgaggtgagatcgtgccactgcactccagcttgggcgacagagtgagatctgtcttgaacaaacaaacaaacaaacaaagaatttatcttttaactgaaagagtttaaaactgagagacttacgtgagtctctctctctttttttttttttttgagacggagtttcgcacttgttgcctaggctggagtgcaatggcgtgatcttggctcaccgcaacctctgcctcttgggttcaagcaattttcctcctgcctcagcctcccgagtagctgggattacaggcatgtgccaccatgcggggctaattttgtatttttattagaggtggggtttctctatgttgatcaggctggtctcgaactcccaacctcaggtggtctacccacctcggcttcccaaagtgctgggattacaggcgtgagccatggtgcccggccgtctctgtctcttaatttctctctttctttcctttctttctgtctcccttccttccttcctttcttttcttttccctccttccctcctttctttctctttctctctccttccttccttccttccttttttccttctttccgcgggaacctggggcaagtagaagatacaacatgagaagggggaggcctccagggaggccatctagacaactgaaagagagacggcaaagtggactggtggccggaggagtgctggagggttctggagagaaggaggctgattccagatgtttaagatgtggggtcagcaggaccctgggtgaccagtgaaatgtggagaaggtggcagccaggtcaattagagacagatgtgggggaaagccattctctctcagaattctggagggttccatatatgggatggagttattctggggacatcataagaaatgggtgtgcctgtcaggcgagcagttcacttgtcagcccccacacagagctgaagcatcatagcccaccccagttcactgcccactctgaaaacagaagccgggcaagctccaaaaagccggaagaaccttctagaagccctgtgttcttctgaggcccaacttcaatctgatgccatctcaagcgccagtgagatcggtcatagaagattagaggctttattttttctcaggcagttgagtttattttcaggttagcagcagtttggagttcgcttcctggatgaggtcagagttggaggggcaggtggccacagtgtgctgtgtgcagagtccttgcagccacgacactttggccgttctaccttgtgcacagttctgtctcaaagagactggccccaaagcaggcacagaaataccaggcttacttacttacttactttatttatttgtttatttttgagatggagtctcactctgtcgccaggctggagtgatctcggctcactgtaacctccgcatcctgggttcaagcgattctcgtgcctcagcctcctgagtagctgggattacaggcacgtgccaccacacccagctaattttagtgtttttagtagagatgggggtttcaccctgttggccaggatggtcttgatctcctgacctcatgatccgcctgcctcggcctcccaaagtgctgggattataggcgtgagccaccgcgcctggcctatttatttatttaagacagggtcttgctctgtcacccaggctggagtgcagtggcatgatctctgcccacggcaacctctgcgtcccagattcaagcgattctcttgcttcagcctcctgagtggttgagattacaggtacccgccaccatgcccggctaatttttttgtatttttagtagagacggggtttcaccatgttgggcagtctggtcgcgaactcctgatctcaaatgatcggcccgcctcagcctcctaaagtgctggaattacaggtgtgagccaccgtgcctggccaccaggcttaactttaggaattacttcactttccccagccgcagttcgtttatttgtacaaggcaggcagtaccggtgccaccacctcgagagcctgtttaaagcaggcaccgagcagggcacttaacgcaccttcttggtggctgtccagtaaacaacgtgggggtcagcgacccagagggcagcacagacctctccaccgcttgtcacagaattgcagcctctctaacaccacgcacaagataacacgggtcactggcctcagccagctcgggacgttttccagagttcactttctggatcctacctataacccttccattcctctctctttctctctctctttctttctttctttctttctctctctctttttctctttttttttttttttttttttttttttttggagatagagtgtcgctctgtcgcccaggttagagtacagtggcgtgatcccggctcactgcaagcttcgcctcccgggttcacgccattctcctgcctcaccccccaagtagctgggactacaggcacccaccaccacgcccagctaattttttgtattttttagtagagacggggtttcgctgtgttagccaggatggtctcgatctcctgaccttgtgatccacctgcctcggcctcccaaagtgctgggattacaggcgtgagccaccgcgcctggcctcttttctttttctctctctctctttctttcctgctttctctttctttctcccttccttccttccttccatccctctttccctctctctctctttctttcttcgatggagtctcattctgtcacccaggctggagtgcagtggtgcaatctcggctcactgcaacctccgcctcctgggttcaagtgatcctcccgcctcagccttccgagtagctgggactacatgtgcgtgtcaccacgcccagctaacttttgtattttagtagagatgggatatctccgtgttggccatgctggtctcaaacccctgacctcaagtgatctacctgtctcggcctccgaaagtgctgagattacaggtgtgagccactatgcccggtctccagaatattttcatcgccccagaaagaaaccctgtacccattacctgtcactccccatccctggaacccactggtctacttcctgactccacggatttttttactccggatacttcatataaatggaatcttatccagtgcattattttgtgtctggcttctttcactgagcatgtttttaaggttcacgtgctattgtagaaggagttagtacttcattccttttcagggttgaatgtaatttcatcctatgccggaggctgagtcaggagtgttacttgaagccaggagttcccttaggcaacatagcaagactctaactttaaaacatctttgaaaaattaagtccgggctgggtggttcatgcctgtaatcccagcattttggggggccaatgcaggcagatcacctgaggtcaggagcttgagaccagcctggccaacatggtgaaagcccatctctactaaaaatgcaaaaattagccaggcgtgatggcgggagcctgtaatcccagctactgaggaggctgaggcaggagaattgcttgaacctgggaggcagaggttgcagtgagccaagattgcaccactgcactccagcctaggcgacagagcaaaattccatatcaaaaaataaaaataaaataaaaattagctgggggttggcagggtgcagtgtctcacccctgtaatcttagcatgttgggaggccaaggagggctgatcacctgagaattgcttgaactcaggaggcggaggttgcagcgagtgtaatggtgcgagcttggctcactgcaacctctgcctcgttggttcaagcgattctcctgcctcagcctccctgagtagctgggactacaggtgcccgccatcacacccagctaatttttttttgtatttttagtagagacaaggtttcaccatgttggccagactggtcttgaactcttgacctcaggtgatcctcccgccttggcttcctaaagtgctgagattacaggcatgagccaccatgcctggccttttttcttttctctatttttgagatggagtctcactctatcgccaggctggagtgatcttggctcactgcaatctccagggttcaattgcctccagggtttgagcaattctcctgcctcagcctcctgagtagctgggattacaggcatgcaccaccacaccagtctaatttttgtggtttttatttttatttatttattttttgagatagagtttctctcttgttgcccaggctggagtgcctcgatctcagctcactgcaacctccacctcctgggttcaagagattctcctccctcagcctcccgagtagctggaattataggcgtccaccaccatgcccagctaattttttgtgtttttcgtagagagggtttcaccatgttcgccaggctggtctcaaactcctgacctcaggtgatccacccgcctcagcttcccagagtgctggaattacaggcatgagccaccacgcctggcctaatttttgtatttttagtagagatggggtttcaccatgttggccaggctggtcttgaactcctgacctcaggtgatctgcctgacttggcctcccaaagtgctgggattataggcgtgagccaccatgactggacttcttcctatttttttttttgttttgttttttgagaccgagtctcgctgtgtcgcccaggttggagtgcagtggcgcgatctcggcttactgcaagctccacctcccgggttcatgccattctccgcctcagcctcccaagtagctgggaatacaggcacccgccactgcgcccgtctaatttgttgtatttttttagtagagatggggtttcaccgtgttaaccaggatggtctcaatctcctgacctcgtgatccgcctgccttggcctcccaaatgctgggattacaggcgcgagccaccgcgcccggccccttcttcctattctttcaaagccaccagttgccctcctatgataacccattatctattaacccatggatctgttaacccaggaatggattaatcagttcatgagggcagaattctcatgacccagtcaccccttaaaggccccacctctgtcaacacggccacatcaaggattaagtttcaacgtgagttttggaggaaacgaacattgaaactgtggcaccaggtgttatcagtctattaagagctcatgcaaattgataagcaccaaaggtgcaaagatcagaaacagacaattcccaggaggataagcggggggtctaggagcctaagagtggatgtattgggcatcaagggagggcctgttggccagggttggtcacagcaaggatcattccaatgctgccgggaccccaacacttgctttctggccaggcgcggtagctcacgcctgtaatcccagcactttgggaggccgaggtgggtgggtcacgaggttaggaaatcaagaccatcctggctaacatggtgaaaccctgtctctactaaatgtacaaaaaattagccgggcgtgatggcgggcgccagctacttgggaggctgaggcaggagaatggtgtaaacccgggagatggagattgcagtgagcagagatcatgcgactgcactccagcctgggtcacagagtgagactccgtctcaaaaaacaaacaaacaaacaaaaaacacttgctttccaaaggggtggctgccacttcaattggaaagaccctttggacaatgcacacccagcatataagagggttcataggccaggcgtggtggctcacacctgtaatcccagcactttgggaggctgaggcaggaggagaattgcttcagtctgggagttcaagaccagccggggcaacatagcaagatcctgtctctatggataaaaaaaaaaaaggtcgggcccagtggctcacacctgtaatcccagcactttgggaggctgagacaggcagatcacctgaggttgggagttcaagctcagtagctctctaaaaatacagatcacctgaggtcaggagttcgagctcagtagctctgtaaaaatacagtaattagccgggcatggtggtgcacgcctgtaatcctggctactggagaggctgaggcatgagaatcacttgaacctgggaggcggaggttgcagtgagccaattgcgccattgcgctccagcctggacaacagaacgagactccatctcaaaaaaaaaaaaaaaaaaaaaaaagagggttcgtagtctgagcttgtgattataccactgaaaattaccccaagccacttgtggaagggctgcctgcagaaggacgtgtcttaggctctttaataagttaccttctggttggaaactacctaaacgcccagcacgcaggctggcccggtaaatcacgcacccataggagttatggtcaggaggcctgtgactctgtagagtggtagtggctcccgggccctgggccaagcgctgtactgatgccctcaaatcctcatggtaacagcctgttcagttctgttcaccccattttacagcaaggggctgctctgggggcagggaggagcccagctgggtgggagatcgtgggttcatggtggcatctgtgggtactccatccaatcaagggtctgaggcttaagaagcttaaatttgggggagatagggacattctcaatggtgcagttaaagcagtggcttcagattctggtgggagaggaaggaactgaggctggggaaagggatgtattggtcttttctttggaaacagtcttgctctgtcgcctaggctgggctggagtgtaatggcacgatctcggctcactgcaacctccgcttcccaggttcaagcgattctcatgcctcagcctcctgagtagctgggattacaggcatgtgtcagcacgcccagctactttttgtatttttagtagagacagggttttgccatgttgcccgggctggtcttgaactcttgggcaacagtgatccgcccgcctcagcctcccaaagtgctgagattacaggcatgagccatcgcccagtctcactggtctttcatctttgttccatcctcattcccattcagcacctgatgtacttctctcttactggggtgcaccccaggggacgcatgactgtgctacagcccacggggtttcagcagggtgcgcagaggacctcaggtggcccttgttacccacactcattccttgccaggtcttccacaggtcaaggagccaggattctggggtttggacaccccattctctggcggatggggctggcctggagcctgggtgggagtaccgggtttcatacatcgggggctcaggcttggggaggggtcacatggaagtcacctggctggccagagcagttgcagccacagcaggtagaaggcaggagccaggactgggtgggcctgcgtgggagggacggccaaaccctgaaactagcctccaccctccagggtacaggggcttccctggacacacactggccttcctcgtcctcctctttataccattgcacccaggtttgtttgtctgtttttagtgacagaggcttgctgtgtcacccaggatggagtgcagtggcacattctcagctcactgcaacctctgcctcccagattcaagcaattctcctgcctcagtctcctgagtagctgggattataggcatgtgccaccgcatccggctaatttttgattttttttttttttttttttttttttttttttagtggagacggggattcattatgttggccaggctggtcttgaactcctgacctccagtgatccacctgcctcggcctcccaaagtgctgggattacagacatgagccactgcacccagcccctggggttttatttacccagatccccactgcctttccttcctgtggctgacatctccctacactgtcccccagaaacacagctgttttgccctcaaccacagctcctgcatccagtgcagggcctggctcttgactgagacatcagcaaatgtgagccctgctctcctgggtcaatgcaggctccttcaggaaggaggcggggatctgtcccccttggcatccccagtgcccagcatggggggcctggcacccatgaggcagccaaggctttcagaccaaatgaacaagcagtgagccctgccttcgagggcccgtcttgaggacaccaggtgggtttatgacatcccagtggacatgaggcccccagggaccagttcctctccggcattggcaccagggcccctgccccactggatcagacctcccaagcttggggtcccttttccagtaggcaagagaggcacccgactcctgcttcagcccaaggagaacctgccgactccaaggggtggccattgaggggatcagtgacgtaagtccttcagaggcagcagggacaaggagctgtagggaaaacagggcaggcctggggttggggggtgtggggtgctgacaaggtgcagacccaccaccccaaccaagcccctcctccgcagatccatcacctctgccccgtgccccatgaatgaaccagctcattccccggcccagtgaccagcacaggctccagacgtttccctcggacattgtctgcctgaccacctcttccagcacagtgaggggcctgggatctggaggccagagtgggccaggcctaggggtggggggaaaaacgtcactattcttagatccctcgtcctccagggcccaggccaggcggagcagtcacattccagaggtagaaaccatcagcccacacaaatgcttgtgttccctgaggaggccaagggtcaccaggaactaaaatcagcttttcccaagaaaggcgggagacagggtggggggcggggggcagggttagaaaggccaaaggtcacccaataaacccttccagctgcccctggtggaaagcccctctgagtccggagggatgaggacagagggattctcgccctctaagctactctgcgggctggctgattcttcctggtagggggcggtcctgtgcagtctagattatttagcagctctctggcagcccaccgcccccccagcctcccagtggtgacagccaaatctctctccaggcacgggccaggtgtcccctggggaaaaatcgaccccagatgagaactgtactttcccaaacagagcttccaggtggcgtctggggtagatatttaggatcctgctgttctatggactctgttctctcagcctggaatcctcttcccgcatagcacaatcccccaccagccctgcaatcttccagaactaaacccacacatcacctccctcaggaagtgtcctgtgggccccccatcttatgattttggcccccacggatgctgtggtaggtaaaataaagcccctttggccagatatggtggcttacacctgtaatcccaacattttgggacgccgaggagggaggatcacttgagcctaggagttagagaccagcctggacaacatagcaagacacagtctctacaaaaaaaaataaaaaaattagctggggctgggcgcggtggctcacgcctgtaatcccagcactttgggaggccaaggcgagcggatcacaaggtcaagagatcgagaccatcctggccaagatggtgaaaccctgtctctactaaaaatacaaaaattagctgggcgtgttggcacgtgcctgtaatctcagctactctggaggctgagcgaggagaattgcttgaacccgggaggtggaagttgcagtgaaccgagatcgcaccactgcactccagactggcgacagagaaagactccgtctcaaaaaaaaaaaaaaaaaaattagctggggccgggtgcagtggctcatgcctataatcccagcactttgggaggccgaggcggatggatcccttgatgccaggagtttgagaccagcctggcaaacaaggtgaaaccctgactctactaaaaatacaaaaattagccgggcgtggtgacacatgccagtagtcccagttctacttgagaggctgaggcaggagaattgcttcaactcagtgggggcagaggttgcagtgagctgagattgagccattgcactccagccttggctacagagcaagaccctgtctcaaaaaaaaaaaaaaaaaaaaaatgctggtcttggtggctcacgcctgtaatcccagcactttgggaggctgaggcgggcagatcacctgaggttgggagttcgagaccagcctgcccaacatgaagaaaccctgttgctactaaaaaatcaaaattagctgggcgtggtggagcatgcctgtaatcccagctactcaggaggctgaggcaggagaattgcttgaactcgaggggcagaggttgcagtgagatgagatggagccactgcactccacccttggctatagagtgagactctgtctcagaaaaaaaaaaatgaggaggcaggagggtcacagtcagaaagagactggaagaggctgcgctgctggccgtgaaggtggaggaaggggccccaagatgagagctgtaggtacctctagaagctgggaaaggctgaaaatggagcctccaggaggaaccagcctcatcaacaccttaattttaggacatctgacctccagtgctgtaaaatcataaatctgggttgctttaagctgctctgtttctggtcatttgtttcagcagccacgagagactcataccagcctcttctctgcagccccgagtcagccctggagagctgccgggcagtcggcctggcatttgcctttcctggcatgagctttgtaacccggcagagctgctggccgtggcaagcatctcctaggagatgggagaactcaatggaaaaaggtttcagagtcagggcttgggtggaccacattccttcaagctttataccatagagagctttgttagggaggtggagaagcagacaaagtgactcgtgttctctccaatttatttatttatttaatttatttattttcagacggactctctctctgttgtccaggctggagtacagtggcttgatcttggctcactgcaacctctgcctcgtgagttcaagtgattctcctgcctcggcctcccaagtagctggaattacagacatgcactaccacacccagctagttttttggtatttttagtggagacagagtctcaccatgttggccaggctggtctccaactcctgacctcaagtaatccgcctgccttggcctcccaaagtgctgggattacaggcgtgagccaccatgcccagcccaaataattgttttaaaaggccaggctggtggctcatatctggaatcccagcactttgggaggctgtggtaggaagatcacttgagcccaggagcccgggattcccaggctgtagtgagctatgatcgggccactgcactccagtctggacgacagagcctacccccatccctgccccccgaaaaagttattcctataaagacccaagggcccaatctttgtttcatggtacctttgttctttatttcttactacttattcatttttaaatattctgaatagtcaaagtcaagatgtagctgactttgaaatgcttccctgccaggtgcaatgactcacacctgtaatcccagcattttgggaggctgaggcaggagaattgctttagctcaggagttcaagaccagcctgggcaacatagcgagatccctgtctctacaaaaaaatgacaaagttagctgggcatgatggtgcacacctgtaatcccagctacttgggaggttgaagtgagagggatcactggaccccaggagtttgagactgcagtgagccatgatcacaccactgcactccaccctgggtaacagagtgagaccctgtctcaatcaatcaatgaatcaacattttaaatatgaaacattttccacattcttcaacatgtcctagggcagtccttgttccctttccctaggacagctcatttttgaattttagaagcaatgctaaagggaaaatgtgtctgtgtgttttttttttttgttgttgttgttgtttgtttttgttttttttgagacagaatctcactctgttgcccaggctggagtgcagcggcatgatcttggctcactgcaacctccacctcctgggttcaagccatcctcctgcctcagcctccctagtaggtgggactacaggcatgcgccaccatgcctggctaatttttgtattttaagtagagatggggtttcaccatgttggccaggctggtcttggactcttgatctcgtgatctgcccgcctcagcctcccaaagtgctgggattacaggcgtgagccactgagcccggccgggaaaatgtgttttaagtttcagttaggccaggtgcagtggctcacgcctgtaatcccagcatgttgggaggcctgtaagaaataaagaggaaagaaacacaaaagttggcttgccagtcaacacaggtttattttagagaaaacaaacctgagaggagtattccaggcaagttgagtcagaggcaaactctcttacagactaagaggtttttttgtttttgggttgtttgtttgtttcttgtttttgttttgagacagagtttcgctcttgttgcccaggctggagtgcaatgacgtgatctcggctcactgcgacctctgcctcccaggttcaagctattctcctgcctcagcctcctgagtagctgggattacaggcatgtgccaccatgcccggctaatttttgtattttttagtagagacggggtttcaccatgttggccaggctggtctcgaacctcgtgatctgcccacctcagtctcccaaaatactgggattacaggcatgagccaccgagctcagcccagactaagagttttaaggattcagggtgggagagtttatcagaggcttggactgcttctgtgtctctttgttgtgcttatctgggagggagagttgcgtgtctgtccccatacatcttcttgcagctgcaggcatacccgccccccaaaaacccccaccgggagtctgcctttggcttccctgtttcagtgcacctgaagggaaaggaatgtgcttattaagtaaggccccactgttttactggggcccattgtatgagggtgaagtttggcaattacccaacagactttccccctatttccctctgtgcccgagctgtcttatctgtgttttactgcctgctctttctggctgcttgtagttagaagataagtgatatccttgaaatgtaagaggctagagagggagctggaacttaaagtggtggggtttgtccaagatgacagtgcttctgctctgtcattccagaccctatagttgtaaaaggacaaggggcgacgtgttctttctggctacttcctgctgttgtggggtggaggggagacacggagagttttttggtcttggattgcctgcaggagcaatattgtgtgtagatgttttggtagttgtctacgaaatggccataaagggtaaaaacattagtcctaggcttttcagcagcgtttttttttttttttttcttttgagacggagtctcgctctgtcgcctaggctggtgtgcagtggcgcgatctcagctcattgcaagctccacctcccaggttcatgccattctcctgccccagcctcccaagtagctgggactacaggcacgcgccaccacgcccggctaattttttgtatttttagcagagacggggcttcactgtcttagccaggatggtcttgatctcctgatctcgtgatccgtctgcctcggcctcccaaagtgttggaattacaggcgtgagccactgcgcctggccttcagcagcgtttcttattaggcctaattggttgagacagaatcaacatttttttcccaatgacaggcagaggcgcatgtttgggaagacccatgtgttatttgtttgttagcaactgttattcctggtatgaggataataactaagccaaatgctacggtaattgagactctgtgtccgatattccaccctgagggtactacagtatatagtccttctgcaaatagtagactaaagcaattcccatgagggtggcatagtaaataatttccattaaaaaggttttaatatttggcttaaaaggagatgtagaaatgacaaaaagtatttggtgaggtaggggtgagactgaaatgagtaatttccacttagttacttatcttttttttttttttttttttgagatggagtcttgctctatcgctcaggctagagtgcagtggcgtgatctcagctcactgcaacctccgcttcccgggttcaagcaattctcctgtctcagcctcccgagtagttgggattataggtgtccatataggtgttctatttttagtagcaacggggttttaccttgttggtctcaggctggtctcaaactcctgacctcaggtgatccacccacctcagcctcccaaagtgctgggattacaggtgtgagccaccttgcccagccacttatcttttatgattttcaggttaagatttgttatttttttttacattgataggacctttctctaggctgttaggggttgctttctccactctttaggctttgagtgtaatgtatccaggagttgatttctgtaacacatataatttaaactgtagaaaataataaaaattgaaaaacattaggcaagactagaatttaacaacaggtgtgctatagtttctgaaacataattttcactcttcagtttcccatttttattaaaagataaatcatggtaggactggtttgctttattatatttggcttaattatttgcatagagtgcagcaagaataattatttgctacataggccttttttttctctttttttctttttctcgagacagagtcttgctctgtcacccaggctggagtgcaatggtataatctcagctcactgcaacctccgcctgctgggttcaagcatttctccttcctcaccctcctgagtatcagggattacaggtgccagccaccaagcctgctaattttttgtatttttagtagagatggggtttcaccatgttggccaggctggccttgaactactgaccttgtgatctgcctgccttggcctcccaaagtgctgggattacaggcatgagccaccacacctagccgctacacaggccttttaaatcagctttgatggaactttgttatatagaaggaatttgagataagacttgtttaagccaagcccagccatggatttgtaacatgaaatacctatgagttgggtgaattcctctcctcttgaggttttaagataacttggggttcctggcctgtcagaaaatgaccttctttacttaccacagatcagaaaccctgtacaggaactgtatacacaaaatataaggccagtttccaagggctttattgactccataagtcactcaaggttaggagttcgagaccagcctggccaacgtggcgaaaccccgtctctattaaaatacaaaaattagccaggtgtggtggcatgcgcctgtaatcccagctacttgggaggctgaggcaggacaatcccttggatccaggaggaagaggttgcggtgagctgagatcgcaccactgcactccagcctgtgtggcagaaggagactccgtctcaaaaaaaaaaaaaaaattagctgggcatggtggcgggtgcttgtgaattgcttgaatccaggaggcagaggttgcagtgagctgagatcgtgccactgcactccaccctgggcaacagagggagactctgtctcaaaaaaacaaacaaaagaaaggaaattcacagtcaaatggacacctaccctatgcagcacccttaaccctttcagtagcagctaaaataggaagatcaggctgtgttgccttggcgtcccctggcctccgctatcagcccgggggtccaccatgcctcttcctgatgccagagataaggagggctgggggcaccaccttgaacaaacagcctcacgtcagaggtgatggaaagaaggctgtgatacagacactcatggggccgtgtttctgcagctgaaagagtgagagctgtaaggagcgggggctaaggctgttcagcttaaattgggagccagtgcaggggtttaggaccaggaggcgagagaggggacaatgaggcaggatgggatgggggagctggatttctttggcatgggggaaacttgagagcaatcctggcatttatccatctgttgccagagggagcagctgtggaaccagggaagggaaaacaacaggtggtcatggaagagagagggtgatgtatgaatcgtggttttaattttctgtgcttatgatactttagatctagggctttgaagaccaggagagggacggacggtcccttctggggctggccagttcctagagatagaaacacttccctccaagtgtgccttttctattctgttctgttctgttccctttccttttcttttcttttccttttccttttcttttcttttccttttccttccttcctttcctttatttcctccttccttccttccctccctcccttcctccctccttccttcctttcttccttcttcttggctttctttcttctttctttctttttttggctctgtcacccagtcgcccaagctggagtgcagtggtgccatctcagctcactgcaacctctacctcccgggttcaacaattctcctgcctcagcctcccaagtagctgggacaacaggcgcacaccaccacacctggctaatttttgtatattttttagcacagatggggtttcaccatataggccaggctgctctcaaactcctgacctcaagtgatctgcttgcctcagcctccaaaagtgctgggattacaggcgtgagccactgtgcccagcttcttctttctcttttctcttttctttctttctctctcccttccttccttcctttctctctctttccttccttccttctttctctttctctctctctctctttccttccttccttccttcctttctttctttcttcctctttccttcttttttgagacagagtcttgttctgtagcccaggctgtagtgcagtggtgcaatcacagctcactgcagcctcaactttccaggctcaagcaatccttctgcctcagcctccctagtagctgggactgcagatgtgtacaactatgccctgctcattttttttttaaagatggggttctgctatgttgctcaggctggtcttgaactcctaggctcaggtgatcctcctacttcaacctcccaagtagctgggatcacagatgtgtgccaccacacctggctaatttttaaattttttgtagagacaaagtctcactgtgttgcccaggctggtctcaaactcctgggttcaagtgacccttccacctcggcttcccaaagtgctgggattacaggtggcagccaccgtgcctggctgggaagcatttcaaagtcggctacatcttgacttctactattcaaaatatcaacaataaataaaaaataaggaacaggccgggagcagtggctcatgcctgtaatcccagcactttgggaggccgaggcgggtggaccacctgaggctaggagttcaagaccagcctggccaacatggtggttcactctccaagctctccaagctggtgaccttgggagctatatgttaaagatggcagagccagaagacggaagggacctgtgttctggaaacagccctcagagaagccctacctgccaatcaggaacattcatcatggactttacatgactgtggtggatggtatcatttgttcacaattgcctttgtttaaatgtatgtgtccctccaaaattcatacattggaactaaaaacccaaggtgttagtattagaaggtacagcctttggaacatgattaggtcatgagaactctgccctcatgaatgggattaatctcattagaaaaggctgggtgaggtggctcatgcctgaaatcccagcactttgggaggctgaggagggaaggattgcttgaagccagaagtctgagagcagcctgggaaacacagcaagtccccatctttgcaaaaaacaaaaaagttagctgggtgtggtggcatgctcctgtagtcctagctccttgggaggctgaggacttgatgattgcatgagcccaggagtcaaggttacattgaactatgatcacacccctgcactccagcctgggcaacatagcaagaccctgtctctaaaaaaagcaagagaggggggttgaaggggagcaggtaggtcctttttacctttctgctgtgtgagggtgcagcaagaaggctccaccttgggaggagagaatgagccctcacccaggtactgaatcctccagtaactccatcttggacttcccagcctctagaactgtaagcaataaacttctattattgacagattacctggcctcaggcattttgttatatcagcacaaagagactaagacaacacatcttcctctcttcctcccctgatcactgctccctgtgggtggggtgcactccccattctccagcttagggtgtggccatatgacttgttttggccaatggaacctgcatggaagtgaccctcatcagatcggagacaaaggctgaggaagcatcacgtggtcccgccactctgcttgcatgtcaccttgccatgaaacaaatatgggccctgatgggtcacctgaggtcaggagttcgagaccagcctgcttaccatggtaaaactctgtctctactaaaaatacaaaaaaattagctgggcacggtggcggatgcctgtaatcccagctacttggggggctgggaaagaatgaaactccatctcaaaaacaaaaaaacaaatatgggccctgaagcctctgaatgaaaagtcacatggaacagatgcaaatccaactcacagcctggagcaagttccagtggggctacaggtgacccccagacccacaaagggaaaatcattgctttttatttatttatttatttatttatttatttatttacttatttatttatttattttttgagacagactctgctctgttgcccaggctggagtacagtagcatgatctcagctcactgcaaactctgcctccgggttcaagcgattatcctgccttagcctcctgagtagctgggactacaggtatgcaccaccacggcccagctaatttttgtatttttggtagagatggggtttcaccatgttggccaggctggtctcaaactcctgacctcaggtgatctgcccacctcggcctcccaaagtgctgtaatccaccatggccaggcttattttatttttttaaaacaaagccaaacaaaacaaaaaaaacacttggggccaggtatggtggctcacgtctatactcccagcattttgggaggccaaggcggatggatcacttgaggtcaggaaaaatgtctctcctaaaaatacaaaaattagccaggtgtggtggtgggcgcctgtaatcccagctactcaggaggctgaggcaggggaatcacttgaaccagggaagtggaggttgcagtgagctgagattacaccactgcactccagcctgggtgacagagtgagactctgtctcaaaaaagtaacaacaatacttggcttggctaccctgatcaaatcacaaattcctcatgtgtagaatgggaataagtatattgtttaccttaatgtgtcactgtaagcatctattgcaacaatgcacatgaaattagcccagaacaagggaggcacacaagtaagtgtggggtgtagggggaagtgggaaagctgggggaaaggggggcctgacaagagttttttttaattttatttttatttttatttttattttatttttttgagacagaatttttctcttgtcacccagattggagtgcaatggcacaatcttggctcactgcaacctccgcctcctgggttcaagtgattcttctgcctcagcctcctgagtagctgggattacaggcacaaaccaccatgcatgctaatatttttgtatttttagtagagatggggtttcgctttttttttttttttttttttttttgagacagagtcttgctctgtagtcctgttgctctgtcgcccaggctggagtgcagtagcacgatctcggctcactgcaacctctgcctcccaggttcaagcgattctcctgcctcagcctcctgaatagctgagattacaggcacgtaccaccacgaccatctaatttttgtattttttgtagagacggggtttcaccatgttgatcaggctggtctcaaactcctgacctcatgatctacccacctcggcctcccaaagtgctgggattacaggtatgagccactgtgcctggcctgggtttcgcttttttttttttttttgtatttttagtagagatggggtttcgctatattggccagggtggtctcgaactcctgacctcaagtgatccacccgcctcggtctcccaaagttctgggattacaggcataagccactgcacccagccaggactgagaagagtttataggcctgtgaagggctggacaagctgagagctcccttgggcacttgggggcctgcagcaaggaggcttggtccactctcaagtctgaggtgcttgctcagcctctattggtggggaaggggaacatcacaggcaaagggatgactgaagtacatcccttccatgaggtttgatggccttgaagtggaggcacgtacacaataagatttcaggggcagacagagatgaatagggcagtcccggccaggcaggtgactcacgcctataatcccagcactctgggaggccgaggcgggtggatcacatggtcaggacttgagaccagcatggccaagatggtgaaaccccatctctactaaaaatacaaaaattagccaggcgtggtggcaggcacctgtaatcccagctgctcgggaggctgaggcagaaaactgcttgaacccgggaggtggaggttgcagtgagttgagatcatgccactgcactccagcctggtcaaaagagtgagactccgtctcaaaaaaaaaaaaaaaagaaagaatagggcggtcccaacatgtggcccagggtgacagggtgtcagagctcgaagctgaatacataatcccagccatgctggctgcctggagatgggcagagggagggcttgccaggcagagtgcgctactagggcaaaggctcagcaggagacaagcggaggtgggagccctgggggaacagcaggtgccgtgagagaagaggcaggaaagaggaaccgtggtgacccaatcttcctccccagcctcctctccagcacctcgcccccaggactgagtgggcaactggcagatctgaatccacgtgcttagaacaaccaggagaggccagagaaggtggctcatgctagtaatcccagcactgtgggaggctaaagtgggcagatggtctgagcccaggagttggaggctccagcaagctgtgataacaccagcactccagcctgggcgatagagtgagaccctgtctctaaaaacaaaaaattggccaggccacggtggctcacgcctgtaatcccagcactttgggaggccgaggcgggcggatcacaaggtcaggagatcgagaccatcctggctaacacggtgaaaccccgtctctactaaaaatacaaaaaattagctgggcatggtggcgggtgcctgtagtcccagctacttgggaggctgaggcaggagaatatcatgaacctgggaggcggagcttgcagtgagccgagatcacaccactgcactccagcctgggtgacagagcaagactctgtctcaaaaaaaaagaaaaaaaaagaaaaagaaaaagaaaatattggccaggcacggcggctcatgcctgtaatcccagcactttaggaggctgaggcaggtggatcacttgaggtcaggagtttcagaccagcctggccaacatggtgaaaccccatctctaccaaaaatgcaaaaattagccaggtgtggtggtgcgcacctgtaatcccagctactcaggaggctgaggcaggagaatcacttgaacccgggaggcagaggttgcagtgagccaagatcctgccactgcactccagcctgggcaacagagcaagaatctgtcttaaaaagggccaggcacggtggctcacgcctgtaatcccagcactttgagaggccgaggtgggcagatcacgaggtcaggagatcgagaccatcctggctaacacggtgaaaccccgtctctactaaaaatacaaaaagaaattagccgtgcgtggtggcgggcgcctgtagtcccagctacttgggagactgaggcaggagaatggcgtgaacccgggaggcagagcttgcagtgagcggagattgtgccactgcactccagcctgggcaacagagtgagactccatctcaaaaaaaaaaaaaaaaaaaaacagaaaaagaaccacaggaagacgggttggaggagcagaggtgaaagcgcagacagattccctaatcctataggcactgacagcctcctgggttccctttgtatgcatggccggcctactggactgccagggttcccacatttgagaagtaggtagcagtgggagggaggtttgtctgattctccagggagctaaggaggcggctcagatcgcccccgtcattccagaaagagagacctaattctaggatctgcccaccttcacccagtgggtccagcatgccactttctttttttatttttaattaattattttttgagactgagtctcgctctgtcacccagcctgcagtgcagcacgcagcgcaatcttggctcactgcaacctccacctcccgggttcaagtgattctcctgcctcagcctcccgagtagctaggattacaggcacccgtcaccatgcctggttaatttttgtatttttggtagggacaggggtttcaccatgttggtcaggctggtctcgaactcttgacctcaaatgatccacccgcctcggcctcccaaagtgctgggattacaggtgtgagccactgcgccccatcctgtttttatttttttcagaggcagagtctaactgtcgcccaggctggagtgctgtggtgcaatcatagcccactgcaaccttgaactcctaagctcgagcagtcctcttgcctcagcctcccgaatagctgtgacaacaggtccacactaccatgccctaccatgcctgggctgttgaatctccctgccctcacctcaccctctgcggcatcttccagatgaccttggcagagctcagatgcagacctgaccacaaccctcccctgactaaatacatctattcagggtgggtgcggtggctcatgcctgtaatcccagcactttgggaggccaaggcgggcggatcacctgaggtcaggagttcgagaccagcctggccaacatggtgaaaccccgtctctactaaaattacaaaaattagctctgcgtgatggcacgggtctgtaatcccagctactcgggaggctgaggcaggagaattgcttgaacccaagaggcagaggttgcagcgagccgagatcacgccactgcactccagcctgggccgcaggactctgtctcaaaaataaaaataaaaataaataaatcttttcggcagcttcttcttggcctctggatgaaggtcacccttctgggcttggcacgtgaggctccaaatagcttctccctgcctacctcatcttccgctatccacccccgcacctcctgccccagatactctgcacttggcagttccctctagcgtcctgccctgctggtctctgactaacacgaggttgtccttcaggtcaccattcagctgcaggtccccctggagacaggtgggatgcccttcacatccccacagcctgatgcagatgttcctccaggaatgtctgatcaggagacatggcagcctaaggcagagcaaggtggctcaggcctgtaatcccagcactttgggaggccaaggcgggatgatcccttgagcccaggagttcaagaccagcctgggccacataaggagaccctgtttctacaaaaagttacaaaattagtcgggcatgatggcatgtgcctgtagtcccagctacttgtggggctgaggcagggggatcgcttgaatccagaggtcaagactacagagagctgtgatcataccaccgcactccagcctgggcaacaggaacattatctcggccaggcacagtggttcatgcctgtaatcccagcactttgggaggccaaggtaggcggatcgcttgaggtcaggagttcgaaccagcctggccaacatggtgagaccccatctctactaaaaatacaaaaattagccgggtgtggtggtgcgtgcctgtaatcccagctactggggaggctgaggcaggagaattgcttgagcctgggaggcgaaggttgcagtgagccaagatcgcaccactgcactccagccttggcaacagagtgagactctgtttcaaaaaacaaacaaacaaacaaaccaaaaaacaaaaaaaaacccaaaaccaaaaacaaatcagagacattatcttgaaaaaaaaatcctcctattagctgtgagggccacttggagagtggtattatctgccttctgtctccagctctctgcacatcactgggcacctgtttttacttacttaattaatttgtttagagacaagcgacttagtcaagttacttggtcaagcaatgtaacctctctcagcctcggttgattgttctttccctataaagtaggaatgaattttaacctaataaggttcttgttacctcaagccactctctttaaaggcatccactagctgggcgtggtggtacatgcctgtaatacttaggaggctgaagtgggagaatcacttgagcccaggaggtggaggttgcagtgagccgagatcgcaccactgcactccagccagggtgacacagtgagaccctgtctcaaaaaaaaaaaaaaaaaaaaaaaaaaaaaacggcatccagcccatccctagtctcttccaatcacaccagcattggtgacagtgatcctcatctgaaaattgtttttaaattttttttaaattaaaatttgtttttccttgtcagcagaaagtcacatctgaatgtcttgcttcattacttgctgcttctcttgtctgcaatgctactaggcactgagcacgtgggactgactccttcactgcttgtccccagcacccagctcagtgctgggcacatagagggtgctcaataagtgtttattgaatgaataacaaatggtcccacatagatgttccatgaggcatctgtgacatcaacatcatcatttttttttttttttgagatgagttcttactctgttgcccaggctggaaggcagtggtgcaatcatagctcactgcagccttgaactcctgggatcaagcaatcctcctgccccagtctcctgagtaactgggactatagatgccggtcactttgcctggctatttaaaaaaaaaaaatttttttttttttttgtagaaatgggggtcttactatgttgcccaggctggtttcgaactcctgggctcaagtgatcctcttgccttggcctctcaaagtgttgggattataggtgtgagccaccacgcccagccagcgatcatcatctttgatagttgcaatgtgtcggcttgctcactgctgtcaccctggggcaccctggggccccgcatgtggctggaacataagggatactcagaaaacagatgtggaaagggtgagtagagctcagcacgttcaaagagggactcaggaccctatgggaccctctccccaaggcctgccaccctctctctccatgcaacccctcctctagcccaaggcagcagggccaggatcaggcagtcactcttcccagctgtctggcccccgcacatcctgcaggggcaggacaagtacaaggatgaaagccaaggtcatgagctcggtaataccagtagtctgaatccctctggagaaccacggcccctgcccaggccactgctacagctgtcccctggaagacagaggcctcaggttagcctggggtggggatcccctcagaactgactttccaggagccagcagagccagctacatcagggacttagggttcaggttagagttaaccaaattctcgaacatcaggccaagggcttgcaagacatcctggaaaaacccttcttccttcctcctccttctcctcctcctccccatcctcctcctccccctcctcctccttctcttcccactcctccttctcctccccccccttctcctccccctcctccttctcctccccctcctccttctccccctcctcctcttccccctcctccttctcctccccatcctccttctcctcctccttctcctcctccttctcctcctcctcctcctcctcctcttcctcctcctcttcctcctcctcctcctccttctcctcctccggttgctgggcaaccactatgcatctggaccaaagcaagaggcagctggtttaaagacacacatagactgaaagtgaagggaggcaaaaagatattctttgaaaatgaaaaccgaaagagatcaggggtagctgtacttgtatcagataaaatattttttaagtcaaaactctaacatgagaggaagaaggtcattatagaatgaaaaaggggtcagttcatcaagaggataaaacaattatatatatatgcacctaacatcagagcacctaaatatataaaggaaatatatataaaggaaatatgaacagatctgaactgcaatacaggaatagtactgcactttcaacaatgaacaccagcctgggcaacaggccacaaaattaaaaatatacatttgtgggttgtggtggtgcatatctgtagtcccagctacttgggaggctgaggcaggaggattgctggagcccaggagttcaaggctgcagtgagccataacaacatcactgtactccagcctggtggacaaactgagactctgtctaaaaaaaaaaaaaaaaaaaaaaaaggcaacgaacagatccaggcagataatcagtaaggaaacattggatttgaaatgcactgtagatcaaatggaactaatgacatatgtagaacattccatttgacagcagcggaacgcacattctcctcaagtgcacaggggacatactccaggatagatcatgttagaccacaaagcaagcctgaacaaatgtaagattgccaggtgcggtggctcacacttgtaatcccagcactttgggaggtcaaggcgggtggatgacgaggtcaggagatcgagaccagcctgaccaacatggtgaaaccccgtctctactaaaaatacaaaaaattagccaggtgtggtggtggcgggcgcctgtagtcccagctacttgggaggctgaggcaggagaatggcgtgaacccgggaggtggagcttgcagtgagccgagatggtgccactgcactccagcctgggcaacagagtgagactccgtctcaacaacaacaacaaaaaaacaaatgtaagattgcgattgtatcaagtatcttttctgaccacagtgatacgaaactagagatcaataacaggaggaattctggaaaattcacacgtgagaattcaacaacactctcctaaacaaccaatgtgtcaaagaagaaattaaaacgaaattaaaaaatatcttgaggccaggtgcagtggctcacgcctgtaatcccaacactttggtggctgaggcaggaggatcacctgaagccaggagttcaagaccagcctgggcaacatagtgagacgctccccccatctctacaaaaaataaaaataattagccaggcatggtgatgctcacctgtagtcccagttatttgggaggctaaggtgggaggaacacttgagttggaggctgcagtgagctacgattgtgccactgcactcagcctgggtgatagagggagatgtttctaaaaacaaaataaaacaaacagaaacaacaacaacaaaaaacttgagacaaactgaaatggacatacaatatacctaaaccaatgaatgcagcaaaagtggttctaagagggaagtttatagcaataaataaatgcctacataaaaaagaagaaagatctttcaaataaccaaattctctttaaaaagaggtaactggaggctgggcatggtggctcaagcctgtaatcccagcactttgggaggccaaggccagcaggtcacttgaggtcaggagttcgagaccagcctgggcaacatagtgaaatgtagtctctcctaaaaatacaaaaattagccagacatggtggtaggcgcctgtagtcccagctactcgggaggctgaggcaggagaatcgcttcaacccgggaggtggaggttgcagtaagccaagatcctgccactgcactccagcctgggcaacagagcaagactctgtctcgaaaaaaaaaaaaaaaagaggcagctgtgggtacaacaggagtccaggcctggcagacggggctcctggggtgtggattgctccctacaagactcgtgaccatgcagggcagtgggggcccatcagaagccaagagtctcatcagggacctggaggcaccagagttcaggagagctgcaggcagctggggtctgatatgcaaaagtgactacaggaggacccccacttctgcccatagtgttctcccagtgcccctgagcctttgccgatgacctcccagtcatctgctctatggcgcttccccattgggggactgtccttttcttcacagtatttaagaaataaaaattagattttcctggccaacaaaaaaagtaagtaacttggcttctctgaccctcaatctcctcctttgcacagttgggccaatggtgagcacccaggagcatccttcatcccactagaggtgcctgccactgggtagggcagatgtggtggtggctggtgcaggcttcccagaacatctcatcgcccctgcccaccacctggccactgcaaccaactgggcttgtctagaaagacacctgcctacccacccaaccctgcaggctctggggtattggtctctgaatttggctgagctacaggatggagaccaccctcaactgctcccatcatcagaggtgcagaacagaagtcggtgtggggggcacttgttccccccagctgtgctgatttcacactggcggagaagaggacccttgctgatagcggactgctcttttatttttttatgagatggagttttgctcttgttgcccaggctggagtgcaatggcaagatcttggctcactgcaacttccacttcctgggttcaagcaattctcctgcctcagcctcccaagtagctgggattacaggtgcgcaccaccatgcccggctattttttttttttttttgtatttttagtagagatggggtttcaccatgttggccaggctgatctcgaactcctgacctcaggtgatccgcccgcctcggcctcccaaagtgctgggattacaagtgtgaaccactgctcccggccgatagcggattactcttaatgcccccagctgctgcaggagtggaagaggccagtccagccccgactgtgaaggtctggcctttactcaaagcaactgtggtcctcagaactccgggatcatcccgtttcttgctccaacccctgggtcccaggtccccagcgcgcccaccccagtgctccgtgcttgctggtccctggagggcccccttactgggaacccttcctccccgtgaaggctgccggcgggacaaacagtgaggggtgaggcagggagggagactcacgttggggacctcccccaagtctgggtaacaccgtcttggccgcggcccgcgggttgggaaggtagggggcagtgagccgtagcggagaggctggccccagcccgccacgccgcttccccacgctcgcagccacgcggagccgcgtcctggtccagcctcacccacccagagcaagaggcggaggaactggaacagcgccccggcccgtgggctgccactggccgcagcaacgggacgggtgagagcacctgcccccgacgcgtcttaactgctctggtggggcggggctgaccgtgcaagccccgccccagtctaagcccctcctacaaagcccggccccttaccataagcgccatctgtcaggctccgcccactgtcttaaatcccactcactctgccctgcccctgactcggagccatatagcaagccccgcccatagccataagccacgcccacccagccctgcccctgggctctaagtgtcatttatctagtcacgtccccggctagaagccacacccaccaggcccggccccacctctaagccccactcacccggccatgtggtttgggacagggaagtaggctaggggccgccgcctctgggctcccagtggaaggggagaaatgagaaaggagtttaggatgtgataaatacccacagaggtcagatgtagctatggatgcaggcgataaaaagtttaaagcaatcagctgtgcggcctctgcagcgctcctttcgccctccctaatcttcacctcgtgtctcccccagtccctgtgtcctggctgggtcctgctgccccagggaaagaagacatgccttctcccatcctggctaacatggtgaaaccccgtctctactaaaaatacaaaaaattagccaggcgtggtggcgggagcctgtagtcccagctactcgggaggctgaggcaggagaatggcgtgaacccgggagacggagcttgcagtgagccgagacagcgccaccgcactccagcctgggcaaaagagcaagactccgtctcagaagaaaaaaaaaaaagacatgccttctcggtgaatgttgctttgcttcctgagggcatggctacccggggctcctggcttttcttccaaaaacaaaacatttcttccattttttctttttcttttgtttttttttttttttttttttttgagacagagtttcactcttgtcgcccaggctggaatgcagtggcccaatctcggctcactgcaacctccgcctcccgggttcaagcgattctcctgcctcagcctcctgagtagctggaattacaggtgcccccccaccacactcggctaatttttgtaattttagtagagatggggttttgccatgttggccaggctggtctcgaactcctgacctcagaggatccgcctgcctcggcctcccaaagtgctggtattacaggtgtgagccactgtgtccggccaccgtttttttttccattttttgagacagggtcttgctctgttgcccaggctggagtgcagtggcatgatcacagctcactgcagcctcaacctccaaggctcaagcaatcctcacacctcagcctcctgagtggctgggactacaggtatgcactactacgtcaggctaattttttaaaaaatttttgtagtgacgcaggtctctctatattgcccggggtggtcttgagctcctgggctcaagcaatcctctggcctcggcctcccaaagtgttgggcttacagacatgagccaccatgcctggcctagagagtttctttcttgttggggttgttcaccggtgggaggtgcaccattgtgccgtgctgactatattcatagagttatgtaaccatcactctcatctaatttcagaacaaaaggaaacccataccctctcacagtcagtccttcattctcccctccccccatcctgtggccaccgctaatttactttctgtttctatggatttgcctgtgatcacaaccagaggatttctgtgacatgctaagttacctaaccatggtgtggaaggagagggaaatggagtgaagttggggacccaccagggaacaggtggcttgagggcggggggagcatgaaggtaagggcttgtttgggggctcaaggcagtctgagccttgttcgcaggcagccagtgtccaccaggtgtgtgcaggtgagggaaacaggggaaaaggccctttctggagacagtaggggtgctggctgggaggcctgggatggggagtggggaggcaagggggcctgtgggtcgaggttggagcttgctgtagaagagggagaattccagaggctgagagtgcaggtggagaggaggaggaagggaggagggcgggcagggggtggctgggtggggctctgtctataaagagtgaagctcagcgtgttggtcctgcagatgggacagcttggcctacagcccggcgggcatcagctcccttgacccagtggatatcggtgagtcttttccttgaacatgactgagatgaacagcttttccctccagcacaacttgttcctactttatacaacctccttcccttgccatatgcctggggcttaagaggggggatgttcccagtacccactcccctcctcttcctcagtccttaccacttccctccacgaccccaggtggccccgttattcgtccaggtgcccagggaggaggacccgcctgcagcatgaacctgtggctcctggcctgcctggtggccggcttcctgggagcctgggcccccgctgtccacacccaaggtactgtgttcggcaatgcctaccaccaagtgcccctctccccatgcccccaccccaccccttttgtctcttatctcctccggaagtctccccaatcccatctccactgaattctcccgctcctgacatgcaggaactcctggtgtttggttagctcttgggatggggtcggggagatggagagtccccagttccttcttcgagagccccatggagtcttttgcaagactcctaaagatgtgagggagcagagggtggcttccagctgtgggcaaagccagttactgccagggatgtattgtagaatcctaatcctgccgagccaggggtggggttggagatcagggccctggagactgacaagagtggattcccatcctggtccctccatgcagtccagctgagagttagttgctcctaaaccatttttttttttttttttttgagacagagtctcactctgtcaccctggctggagtgcagtggcgcgatcttggctcactgcaacctccgcctcctgggctcaagcgatccttctgcctcagcctcccaagtagctgggactacaggcgtgtgtaccatgcccggctaatttttgtattttttagtagagatggggtttcactatgttggccagagtagtctcgatctcctgatctcaggcgatccgcctgcctcagcctcccaaagtgctaggattacaggtttgagccactgtgcccggcttcctaaacctttaggagcctccgtttcctcagctgcaaagtgggaatctaaaattcccactgcatggctctgacttgagggtccagtgagctcatgcctgcaaaagactaggcctcatgtctggcggcggcaatagtaactgttcctgttattaatagggaactctttccttcttccccactccctaccgcagagcaagcacttgaggatttcagtcgccaaaggacaattcctgggcctggggtgtccccacgggagccctgacactgggtcctacatcctctgagtttcagcagctggccaaagcagggtccctggctgggcggcagacccagggtcccaccctccttccctgtctgcccccacctgacccacctgcccctcggctgggtctgatgggtccaagtccttggcctttgcctgggaagggggttgggctgtggtctgattgttttgctatcagagccaggcccagcccagcccttcgatcctggcctccagccttgggaactacctgcctggcactgcagtccgaggttccaacagaatgcgctgccccttgccctcagaggccgcggttgggagacacctggagggctcgagtcctccctttccctgctcctgctgggctgggctctgcagggactcagactcggcctctggaggttagttctggcagaggtgagattgcagagaactccaaaggccatttaggcagagaattgcaccccagcttcctccactatctcatcagctcatcctcggctcattcattccacctgctcatccccccagaactttctggcatcacctcctcctcctctgggcaccccccacagtgcctgtgcttccccctttctgcagagatcagtttcccgggagctccctgaagacaacactaggtctaattcatctgtgtgtttcatctctgcttgtctagacattgacatttactgagagctctttactttgtattaaaacaattttttgtttgtttggttggtgttttgttttgtttcattgagacagagttttgctattgtcgcccaggctggagtgcaatggcgtgatctcggctcactgcaacctccacctcctgggttcaagtgattctcctgcctcagcctccagagtagctgggattaaaagcgcccactatcagccaggcacagtggctcacgcctgtaatcccagcactttgagaggccaaggcgggtggatcacaaggtcaagagatcaagaccatcctggccaacatggtgaaaccccgtctctactaaaaatacaaaaattagctggtcgtggtggcgggcgcctgtaatcccagctactcgggaggctgaggcaggagaatcgcttgaacccgggaggcagaggttgcagtgagctgaaattgagccactgcactccagcctgggtgacagagtgagactctggaaaaaaaaaaaaaaaaggcgcccaccaccatgcctggctaatttttgttttttgttttgttttgttttgagacggtgtctcactctgtcgcccaggctggagtgcagtggcgcgatctcggctcactgcaagctctgcctcccgggttcacgccattctcctgcctcagcctcccgagtagctgggactccaggcgcccaccaccacacccggctaatttttatatttttagtagagacggggtttcaccgtgttagccaggatggtctcaatctcctgacctcgtgatccgcccaccttggcctcccaaagtgctgggattaaaggcatgagccaccgcgcccggcctaatttttatattttttagtagagacggggtttcaccatattggccaggctagtctcaaactcctgacctcaggtgatccacccacctcagcctcccaaagtgctgggtttacaggcatgagccactgtgctgagctgccaatcagctcatttttaggagggaagaacttggctggggaggggtggtgttggcccctcctcacagtgcacctgcactccgagtcacccttttccccagagcaggagtagaggtggccttggtccgttcatttgctggttccacacccttcccagccgggacccaagggtcctctccaacctctggctgtcccaatatccagggataaggggtgagccaggaggctttttctttcctaaggctgttcctcagcctctgccgggcctggaagggttgtggtatgagcagacaggtatgcagacaggtgcccttgcctgtggctggccctgccaagttaacatgcaagggtgcgagtatctgggcggctgtgtggttgcaggtgtctttgaggactgctgcctggcctaccactaccccattgggtgggctgtgctccggcgcgcctggacttaccggatccaggaggtgagcgggagctgcaatctgcctgctgcgatgtgagtggggccgtgggggctgggggggtggggtgcacacacagccttgctgccagcctacaccctaacctgggcacccccctctgctcaccacagattctacctccccaagagacacaggaaggtgtgtgggaaccccaaaagcagggaggtgcagagagccatgaagctcctggatgctcgaaataaggtttttgcaaagctccaccacaacacgcagaccttccaaggtgggcaagacctctgctgggcatctagggggcctgccctccctgcctgcaagcccatgtgtggttcagaccccgagggagggaattggagaccagaatactgacacctgcctgaaccccaaacaaagccagttgctggtgagtggggcaccaagtgaatgaccaactgattgagtcattgtccagtttttgtttctggagatggggtcttgctctgttgcccaggctggagtgcagtagcatgatcatagctcactgcggcctcaaacttgtgggttcaagcaatcctcccacttcagattccccaagtagctgggattacaagtgtgtgccaccagtccagctcttttattattattttgagacagagtcttactgtgtcacccacgctggagtgcaatggcgccatcacagctcactgaagccttgacctcccaggctcaagcaatcctcctacctcagcctcctgagtagctgggactacaggcatgctccactaatccagctcattgttattttattttttatttttattttttgagatggagtcttgctgtgtcatccaggctggagtgcagtggcacgatctcggctcactgcaacctctgcctcctgaattcaagcgattctcccgcctcagccccctaagtagcaggagcacaggcccacgccaccacgcctggctaatttttgtatttttagtagagacggggtttcaccatgttggccaggctggtctcgaactcctgacctcagatgatctgcccgccttggcctcccaaagcactgggattataggcatgaaccaccatgcctggctccagctcattattattattattattttgagacagggttttactcttgtcacccaggctggagtgcagtggcacaatcacatctcactgcagccttgtgttcctgggctcaagcaatcctcccacgtcagcctcccaagtagctgggattacaggcacacaccaccatgcctgggtaattttttattttcattttgcagagacaggttgtgccatgttgcccaggctggacttgaacccctggactcaagcaatccacctgccttggcctcccaaagtgctgggactacaggcatgagccactgcacccagccagtccagctcttttaatcaggacactttccactggtacagatggaaagctcaagcacatgggagactcattggcttaaataaccagtcaacagcttcaggctcagctggatccaggagctcaaaggatgatggcagagctcttgcttatttctctctccatttctccagcaggccctcatgctgtaaagaagttgagttctggaaactccaagttatcatcgtccaagtttagcaatcccatcagcagcagtaagaggaatgtctccctcctgatatcagctaattcaggtaaggactcttggtcatgtgactgtctcccatccatcacctttgctgagggttgagggctcgtgattggctcacactgggacaggagattcacctccaggacccaggagaggtggttgtgcggtcagtgccgcagattcacaggggagggtcctcggtggctgtccactgctgtgactcagcgcaaagacaccacagcaagtgagaaagtaaagccccaggggagtggcccaagagctccagggccccccaaagccagcaattctccagcagggaccgggtggttgtcctgtaattctactgaattctgacattgtgtgtgtgtgtctctctctatatatacatataaaatatatataagtaaatatataatatataaacatatataatatataagtaaatatataatatataaatatatataatatatataagtaaatatataatatataaatatatataatatataagtaaatatataatatataaatatatataatatataagtaaatatataatatataaatatatataatatatataagtaaatatataatatataaatatataatatatataagtaaatatattatatataatatataaataatatataatatataaatacatataatatataaaaataatatataatatataaatatataatatataaataatatataatataaagtatatataatgtataaataatatataatatataaatatatatatttattattatttttttttgagatggagtctcactctgttgcccaggctggagtgcagtggcgcgatcttggctcactgcaagctccaccttccgggttcacgccattctcctgcctcagcctcccgagtagctgggactacaggcgcccgccaccacgctgggctaattttttgtatttttagtagagacggggtttcaccatgttagccaggatggtctcgatctcctgacttcgtgacccacccgccttggcctcccaaagtgctaagattacaggcgtgagccaccgcgcccagcctaaatatataaatatataatataaatatataaatatataatataaatatataaatatataatataaatatatgtaatatataaacatatatgtaatatataaatatatataatatataatatatataatatatataatgtatatatttatatataatatataaatatatataaatatatattatataatatataatatatataatatataatatatataatatataaatatatatattatatataattaatatttttttatggcagggtctcactctgttgctgaggctggagtgcagtggtgccatctcggctcactgcaacctccgcctccagggttcaggcgattcttgtgcctcagccacccaagtagctgggattacaggcatgcatcaccacgtctggctaattttcatatatttattagagatggggtttcgtcatgttgcttaggctggtctctaacttctggcctcaagcaattctcccacctcggccccccaaagtgctgggattgcaggcatgagccactgtgtccagctgacattgtctatctggaggtagtgacacaatccacaggttaaggactcagtcccacaagactgcccccatttcagatgctggttgcaagtagcaagttgtcactttatttctgactgattgtctgtaagtcagggcttccacctctggttggatcattcgatagaacagctcacaggactcatggaagcgctctacttgtgtttaccattttattgtaaaagattacaaaggggctgggcatggtggctcacgcctgtaatcctagcactttgagaggctgaggcagaaggatcaattgagcccaggatggccgggcgcggtggctcatgcctgtaatcccagcactttgggaggcggaggtgggtggatcacgaggtcaggagatcgagaccatccaggctaacatggtgaaaccccaactctactaaaaatacaaaaaattagccgggcgtggtggcaggcatctgtagtcccagttactctggaggctgaggcaggagaatggcatgaacctgggaggcgggccttgaagtaagccgagatcaagccactgcactccagcctgggcaaaagagcgagactctgtctctaaataaataaataaataataaaaaaattgagcccaggagtttgagaccagcctgggaaacatagcgggaccctgtctcaagaaaaaaaaaaacaaatttaaattagctagttgtggtggcatgcacctgtagtttcagctgcttgggaggctgaggtgagaggattacttgagcccaggaggtagaggttgcagtgagctatgatcataccattggaacttcagcctgggggacaaaatgagaccctgtctcgaaaaaagaataaaaagatattacaaaggatagggatgaataagccagatggaagagatgcttaggtaggcaaagactggaagggactcaagtgtagaagcttctgttcccgtggagttgcagtacaccacccctcccacacacggatatggtcacaagaccctgaaccccatagttcaggctttctttttttcagagatgaggtctcactctctccgccaggctggagtgcagtggcgcaattgtagctcactgcctaattgagcagctaggactacatagctcaccgcctcagcctcccgagtagctgggactgcaggccagtaccctcagcttaccagggatttttttttttttgagatggagtcttgctctgtcacccaggctggagtgcagtggcatgatctcggctcactgcaagctctgcctcccgggttcacgccattctcctggctcagcctctggagtagctgggactacaggcgcccgccaccacgcctggctaattttttgtatttttagtagagacggggtttcactgtgttagccaggatggtctcgatctcctgacttcatgatccaccagcctcagcctcccaaagtgctgggattacaggtgtgagccaccatgcccggcctaatttttttttttttttttttttgagacagagtctcactctgtcacccaggttggagtgcatggtgcaatcatagctcactgcaacctctgcctccagggtgggttcaggtgattctcctatctcagcctcctgagtagctgggatcataggcatgcaccaccactgccgactaatttttgtatttttagtagagatggggttttgccatgttgggcaggctggtcttgaactcctgacctcaagtgatctgcccacctcaactgtccaaagtgctgggattacaggcgtgagccaccacgcctggccttcaccagcaatttttttgtttatttgtttttatttttagtagagacggcgtttcactatgttggccaggctggtctcaaactcctgaccttgtgatccacctgccttggcctcccaaagttctgggatgacaggcgtgagccaccatgcccagccaaccagggaattttttagaagcttcatcacataggagtgaaggatgattaactccattgccaaccttcttccccttcctggagaatgggaccaaaagctccaagtttctaatcaatggcttggtcttgctggtgaccagcccccacccagaagccaaccaagagtcacctcattagaataaaatatgtccccattacccaggacactccaagggatccagagctctgtgtcagaaacagaattcaaagaccaaatattagcacaaaaggccaggtgcggtggctcacacctgtaatcccagcactttgggaggccgaggtgggcagatcacaaggtcaagagatcaagaccatcctggctaacacggtgaaaccctgtctctaaaatacaaaattagctactaaaaatacaaaatacaaaaatactaaaaatacaaaaatacaaaaaatacaaaaattagccgggcatggtggtactcgcctgtagttgcagctactagggaggctgaggcaggagaatcgcttgagtcctggaggcggaggttgcattgagccgagattgcgccactgcactccagtctggcgacagagcgagactgtctcaaaaaaaaaaaaaaaaaaaaaagttagcataaaagattctagcactcctattactcagaaattcacaagggttttaggagctgtagggactggaggtagagacaaatgcatatagttactattattttacagccgtcaattttacttcggcctctctcattgcttctgcaggactgtgagccggctcatttctgggctccatcggcacaggaggggccggatctttctccgataaaaccgtcgccctacagacccagctgtccccacgcctctgtcttttgggtcaagtcttaatccctgcacctgagttggtcctccctctgcacccccaccacctcctgcccgtctggcaactggaaagagggagttggcctgattttaagccttttgccgctccggggaccagcagcaatcctgggcagccagtggctcttgtagagaagacttaggatacctctctcactttctgtttcttgccgtccaccccgggccatgccagtgtgtccctctgggtccctccaaaactctggtcagttcaaggatgcccctcccaggctatgcttttctataacttttaaataaaccttggggggtgatggagtcattcctgcctgttacatttcttttttctttttttttcttgcctgttacatttcatgatgaggtgcaagttgctgctgccctgccctggggtgaagccaatgcgatctttgccaccccaagctctcctaacagacggctctccaggggccaagcattggtcactggttgcagaatgcacttcccagctggtgaccttaaaccaattgctgactctctgggtacctctcagcttgtctgtagaataagagtcactgtgcttgctctacttagattccagggctgtggtgagtccagccgatggacacagaagccctctgcaagctcttataggctgcctggaggccactggtaagccaggaccagaccagggacagagctctggtaccaggcgctagtgacaattctgcaggtggaggcctgagtcaccacccgatgatgctgtcttcagtccttggcaacctcagtttccatcacaacagagaatgatctggatgaaaaccaatgcacattgggccgggcaccgtggctcactctgtcatcccagcactttgggagaccaaggcgggtggatcacctgaagtcaggagttcaaggccagcctggtcaatatggtgaaaccccatctctactaaaaatgcaaaaattagtcgggcgtggtggcaggcacctgtcatcccagctactcgggaggctgaggcaggagaattgtttgaacccgggaagcagaggttgcagtgagccgagatcacgccactgcactccagcctgggtgacagagtgagagtttgtctcaaaaaaaagaaagaaagaaagaaagaaaaccaagcacatcatctcttaggggacaccctggtggtttgggatcagggaccgggatgaagttgcagaagaaacggagtcacgttcagtgttcgggctctaccgcgcactatgtgggtgacccggacaggttccacaagctctctaagcctcaattttgcccccctggaaaatgggggtgataatactgcctgcctcatagcgctttgttggagaccaaagacactgtgatgtgtgacacgcacagcacacagtacatgctaactgtgtgtttattaacacaatgagtaccctggccatcgaattggagtccgcctggaaccatgcatggtggtgtgggggctgatggcctgggaacatgcccacctttttttttttttttttttgagagagtcttgctgtgtcgcccaggctggagtgcaatggcacgatctccgctcactgcaacctccgcttcccgggttcaagtgattctcctgcctcagcctcctgagtaactgggattacaggcacgtaccaccacccctggctaattttggtatttttagtagagatggggtttcaccaagttggccaggctggtcttgaactcctgacttcaagtgatccagcctccttggcctctcaaagcactgaggttataggcgtgagccactgcacctggctgcccaacttcctcccctcccctcccctcctctttttttttttttttttttggtggagtcttgctctgttgcccaggctggagtgcagtggcatgatctcagctcactgcaacctctacctcctaggttcaagcgattctcctgcttcactctcctgagtagctgggattacaggcgcccacgaccacgcctggctttttttttttttttttttttgtattttcagtacagatggggtttcgccatgttggccgggctggtctcaaactcctgacctcaggtgatctgctcacctcagcctcccaaagtgctgggattacaggtgtgagccaccacaccccgccaggccacccaactttcaacctggcctgaccttggccaaagtgtttaacttctctgagcctcagttttccctgtaaaatggggatggtaatagcatctattccgtgaggttgtagtgacaatcaaagtggtcaataatggtaaaatacttggatactaacacctgtaattccagcactttgggaggccaaggcagtaagaccacttgagcccaggagctcaagatcagcctgggcagtatagggacatccccatctctaagaaaaataaatgttaggccaggtgtggtagctcatgcctgtaatcccggcactttgggaggccgaagcgggccgatcacctgaggtcaggagtttgagaccagcctggacaacatggtgaaaccccgtctctactaaaaatacacaaattagccaggtatggtggcacacatctgtagtcccagctactcgagaggctgaggcacgagaatcacttgaactcgggaggcagaggttgcagtgatccaagacagcgccactgcagtccagcctgggtgacagggtgagactctgtctcaaaaagaaagagaaagaaaaagaaatttaaaaaaattagctgggtgtggtggcgtgcacctttggtcccagctacttgggagaggctgaggtgggaggattgctcgagcccggaaagtggcgaccacagggagccacgatcgcgccactgcactccaacctaggcaacagagcaagaccctgcctcagaaaaaataaaaaaaaaatcgaatggtgtctggtatgtagtacgtggtcaggaagcgtgagccattattaccattctggggagcccataaggccttctgcttccccaggcacaagatctgcctcgcccagtccaagggcagcatctacttacttcaagaacttgccaaagggcaggcagacttaacccaaaataactttattatcgtctccacttttgatataaaagcattctccaaatggggggcaaatgtggcaagtcactgtggagtctgggccccctgtacacccttctactccgaggaataagccctgtgcccaccccagttgcccattgccatgtcctgccaaccccctgccccccgccagggcaagccacagtgcagtacagaagtgaaagcctgagattggccagacacggtgaccacagggcctcttcctgaccttggctgtgggggcagggggattgcacattgcagcttcttgctgtctccaggaaagactgagtaactggggggcccccggggctggcacagaggcccaggcagaggccgggcttgcctgaggttgtcgtgtagcatttcactcttcctgagtttcggggttcaatctggtcagccatcgcttctggggatcagtccttcccagttccagaatcccccttctctggacagctggggcccactgaggctcctcccaactaaagcaactgcagctgcaccttcagcctcaaggcctggccccatggccctggctgcccctctggctggacaccccagggtcctgccatgtggctcaccacctccagccggtaggttccaggccccggccgcctccgccccagctgcagggagctgacgccacggaggtgatgcatgcgaaagaaaccttgctcgtttccgcggacgatgacgtagcggatccggccctctagaccctccagggccggccggagctccaggatgcgctcggcccggcccaggtgtgagaggttcaggcccaaggtcagcagggcctcggagtcaagggtggccaggttcacctgggaagaaaggccaggtgtgtggtcagagcccaggagaatcgggatgtggtgtgggtagggggtcctcggattgtggccaaagaggagattctggccaatctctaaagtgaaggaaagagccataaaaaggaatgaaatcatgccatttgcagcaacgtggatgcagctggaggtcattatcctaagctaattaatgcagaaacagaagaccaaatacggcatgttctcagttataagtgggagctaaaaattgcatacccatggacataaagatgggaagcacagacactaggactactagagcagggagagagggagggagacaagagttgggaggccgggcgcagtggctcacgcctgtaatcccagcactttgggaggccgaggcgggtggatcacaaggtcaggagttcgagaccatcctgaccaatatggtgaaacccagtcgctactaaaaatacaaaaattagctgggcgtggtggcgggcgcctgtagtcccagctacttgggaggctgaggcaggagaatcgcttgaacccgggaggtggaggttgcagtgagctgagatcacgctactgcactccagcctgggcaacagaggaagactgtctcaaaacaaataaataaataaataaaaggaaaactacctattgggaactatgttcactgtttggatgatgggatcagcagaagcccaaactgcctcatcatgcaatatatccatttattaataacaaacctgtaccctctcaatctaaaaaaataggatgggcacaggggctcatgcctataatcccagcacttttggaggctgtggcaggaggattgcttgaggacaggatttctttgtttcttcttctttttcttttttttttttttttgagatggagtcttgctgtcgcccaggctggagtgcagtgacacgatctcggctcactgcaacctctgcctcctgggttcaagtgattatcctgcctcagcctcccaagtagctggaattacaggtgcctgccatcatgcctggctaatttttgtattttcagtagagacagggtttcactatgttggccaggctggtctcaaactcctggcctcaagtgatccgctcacctcagcctcccaaagtgctgggattacaggcgtgagccattgtgcctggccaaggccaggattttgaggtcagcatgggcaacatagtgagacctcatccacccacaagaagtgaaaatattagtactggtgtgcacctgtagtcccagctacttaggaggctgatgtgggaggtcccaggagttcgaagcagcagtgagctgtgatcacacctctgcactccagcctgggtaacagactgagaccctgtctcaaaaatatatatatgtttattaggcacctactgaattcctggcaatctttgaggcactggggatttagcaatgagcagataaaaatccttcccctcagggagtttaccttctagtaaagcaaagcagatagtagacaaataaatggaaaatgtaaaagtgacaagatgtgctacgaaaagacatgaagttggctgagggccaaggtggacagattgcttgagcccaggagttcgagaccagcctgagtaacctggtgaaactctgtctctactaaaaatacaagaaattaaccaggtgtggtgttgcacacctgtagtcccagctactagggaggctgaggtgggaggatcccttgagcctgggagttcaagctgcagtgagctatgattgcactgctgcattctagcctgggtgacagagtgagaccctgctccccaaaaaaaagaaaataaattgattttaaaaatcaataaataggctgggcgcagtggctcacacctgtaatcccagcactttgggaggctcaggcaggtggatcacgaggtcaggagattgagaccatcctggctaacaaggtgaaaccccatctctactaaaaatacaaaaaaaaaaattagctaggcgtagtgtcaggtgcctgtagtcccagctactccagaggctgagccaggagaatggcatgaacccaggaggcggagcttgcagtgagtggagatcacgctgctgcactccagcctgggcgacagagcaagactccgtctcaaaaaaaaaaaaaatcaataaatagggtgggcacggtggctcatgcctgtactcccagcactttgggaagctgaagtgggtggatcacttgagcccaggagtttgagaccagcctgggcaacatggtgaaccccgtctctacaaaaaatacaaaaattagctgggcaggtgtggtggtacatgtacctgtggtctcagctacttgggggattgaggcgggaggattgcttgagcccaggagttcaaggctgcagtgagctatgattgcgccactgcattccagcctgggtgacagagtgagaccttgtctcaaataaataaataaataaataaataataaatcaataaaaaaataaagtggaggaaaatactgcttcccttggcatctcaagtctggttgttcatccgcaaggtcagctggatctgtagactcagtggcataaggctgaggctgcttctgagagaggcagggaaacggccactgttacacactacagacccctagtcccagctgagggaccttgctcagacccctgccagcctgggccaaaggtatcaaagatttgctctcagagacccagcagccaggggattattcagatgacattgcgacccagagccctaaggtcactcagaaatgtcttgggatggctggtgttaggaacaagggcctttcagcagaagccagcccctaaaagaatgccagagctgacagtgagagaaacgggatgccaagcagggctggagaggagagcgtaaaggaccagacagaagagccgcctgatagcttccgctgtgcttcctgcatctggccctctttgagagccccttgtgtgccaatgacaaacccttctttatttaagctcctctgaagtgccttcctggtcttggcagctggacagggccctgaataagacagcgagcctcaatggcaggctaccccagggctgggtgacgtatccaaccccacagaaagtcatctgtgttttctttgcctttgttttagggagcactgtgttggtttggcctcatttacatgccgacggagtgttttgctgttgcattcaagtgaaagttattcctgttccccagcccctcagttctggagatctcaggccttcttcccacggaatgttgttaagacttatgctcttactgacccctgctggcagtcagtgggtattgcaggcaaaggcacaatacagccctatttttgagacagggtctgtctgtcacccaggctggagtgcagaggtgtgatcacagctctctgccgctttgaactcctgggttcaagcaatcctcccgcctcagcctcccaagtagctgggactacaggcacatggcaccacagctggctaatatttttactttttgtaggtggagggggtctcactatgttacccgggctggtctcaaaatcctggccttgactgggcacagtggcacacacctgtaatcccagcactctgggagtctgaggtgggctgatcacttgaggccaggagtttgagaccagcctggccaacatggcgaaaccccatctctactaaaaatacaaaaattagcccttctctgtcttgatctacttctgccctgggaccctgacaaccactcactcactcttattgagtaccaaggggtaccaatacagtagtaaatcctacagacacagctctacccttatgaagtttacagaaaatatcagtaactatgggataatatatacatccacagtttttcctagcaagggggaaaaaataactagaggggaaaaagggcctttcagtaatacaaagtaatacactcacattttatctaatatagaaagcctctcaagcccaataaccctatcccatgtctcactttgtttttccccatagcacttatcatgtatcatatttgtcatgtgttataaaagatgatatgttttacatgttgatttcttgtgtgtctcccttttagaatatcagcctcacgagggcaggtgtttttgttgttgttgttgttcactgttgctccattacagtgcccagcagtggtattcagtaaaatctgtggagtgaagaagcttcgacctaaatgtctgcagtgggggtgagtttggggtaatggtttccatgctcagtgataattgtttgggaaacaatgtaaagtgatggcttcggaagacagaggggcccaggatggctggccatggatgccaaggctgcttgtaaagagaagtccacgtgccatatccatggaatctctgaaccaccacgttcaagttctgtaacttgggcatgtgccctaacctctcagagcctcagttcctccatctgtaaaatagggataatagtggcatctaggctgggtgcagtgcttcatgcctgtaatcccagcactttgggaggccgagccgggtggatcacctgaggtcaggagttcaagaccagcctgaccaacatgaagaaaccccgtctctactaaaaatacagaattagctgggcgtggtggtgcacgcctgtaatcccagctactcgggcggctgaggcaggagaatcgcctgaacccaagaggcagagattgcggtcagccgagatcacgccattgcattccagcctgggcaacaagagtgagactctgtctcaaaaaaaaaaaaaaaaaatagtggcatctacacctcccagggttgtcataaacattgagaggctgtgaacagagagcacttggagtgatacctgcatacagcaggtgtttaatacatttttggctttcagatcccttgggtgatggctgcaggactgacccatagtcagggactcttcagttgaggggcaagcagctggcatctgtggcaaaaatgccctctctgcacaccttgatggggtggcccgagagggaaggagggatggagccataggcctgccctacggctactgagtggtgtgttgaagatccctgagattcctagagacaaggcaggttcaggaactccaggagcacctcaggcacaagaggggtacagggcagatgctgagtgggtatgtcaggttggggccctggggctcctaaggggagcctctgctggggtccccagagaaaagactcacctccccaaggctcagacagggaaggggcttgggcttaacttggcctaagggtttgtgagaacagcccagagggatgcacagaagagttgagatgggcagagctgtggtacaaaggccacttagggccccattggaactaaatcccaaaaggtcccaagggaggccttcaccaaccaggaggtgagggggtgacagattccagggtgcaggcagggttggaggggcccaggtatttccctgcatccaagtgcctttataaaagggacccatagaaagcatcacagcccggccagggtctgtatggaagacgcctgacttgtcaccaggagtgaggcagagtgtccgggagatgtgtcccccagagaccccccccaagaaaaatcccagggctgagaaagcacaagaaggccctaagccggcaccatgacatggggaacctgttgggatctggagcctggtgctccttcttgggggggctgacatgactaagtcgggtccacagcctctttcccacactcacccattccctggccacccctgcctagtgcagcacccatgtcacctggtggtccctgtgggcactgcgtcgtggccggtcccgaggggagaggccattgatcttgcattcgtagcaggcttcagacgagagcagctcctctttgtccggggtgtcctggggtccggggctgaagcccaggccggagacacagtgcctgggccaggatgggcagggtggaggggtttcagaggcgggctgatgggacctccccagccacgccgctccaccccatactccgttctgagtcatgctgcaaatgcccacgcacacaaatgcctctgagcatgtgctggtgtggctccgtgtgcacgagtgtgtgtgcaccacataagggtgtgcatgtgtgtcccttggttcatttgggcataggtgtgaacacaggagtgagaggacgtgcacaggctgggatggatgaatggacatgagcatacccaggggcatgtgcgtgtgccaacctgtgtgttcacatggggaataactcatgcaggcacatgtgtgctcgtaggaatgtgtgaatctccctgagtgtgcctggggatgtgtgtatagtgtgagcactcacagatggctgacgcgtgcttcctcacctgtgcaaaccaggatgtagcaatggcactgtgcccccagggatgtgggcatgcatgagcctgagtgcacactgggacatgcgcgcgtgcacacacacacacacacacacacgtgtgcatgctgggatctgtaaatgcacaagggtgcccacgcatgctggtacgggtgtgtgccatgtggacaactacatgtgagtgctgtgaggatgtgtgtgaatagatacaggtgccactgtacctctgcgtgtccaggactctgtgcatatgtgggcaaatgcctgcatgcacaggctgaaggagctcttctggtaaattcttggcatgcacaaagccccgtgtgtgtgtgtgtgtgtgtgtgtgtgtgtgtgtgtgcgtgcgtgcatggacgcttgcggggcatggagtctgcttgccccactccagcctctcacccttgcccagcccggaagtagccttgaggacagccgcacaggaagccaccaggcgtgttggcacagctgtagctacaggggccacgccgtccggcgcactcatccacctcctggcagcccccgagggcctgatcaaagtcaaagccagaggggcagacgcagcggaagccaccaagagtgttgcgacaggaggcgctcccgcaggtggggggcgacagggcacactcattctcatctgtgggaggaaaggaggaggagagggaggacgcagaggtggggcagtgcagccttcacacccccagagccctccacctggaatgctgtatgttcagagcccaagtccaatgccaaactcttcagcaagctggcagtgagccctgagactagatcggccccatagccccgctgccccaaaccctgtggttctccttcacaacatctctcaacacttcccctaaaccccaaaatgtgggatgatctagaacaagctttctcaccctcagtgctattgacacttggggccagatcattctctagggaggaggcctccttgcactgtgggacattgaacagcatccctggcttccacccgcttgacaccaggaaaacctatccgcctccaattgtctgtttggagttgggagtctcactctgttgcccaggctggagtgcagtggtgcaaccatagtgcactgcagccttgacgtcctgggctcaagggatcctcctgcctcagcctcctgagtagctgggactacaggtgtgcaccaacatgcctggctaatcttttaactttttgtagagatggggggtcttgctatgttgcctaggctggtcttgaactcctggcctcaaatgatccccctacctcaatatcccacaagagtgaactaccatggcggatcccaattgtgatgatcaaaaatgtctcgcagacacttcaaaatgtactatgggggtaaaatggtcctctgttgagaacctagttaggggtctaattaatctctgtttcctttgctggactgaaaaactcaaggcagaaatggtttttcagctcacttctgcatctgagctcagggcctagtgaaaggcaggtccttggcaaacagttggggaaagaatgaatgagtcagtacggggggaggaaacaagttgaggaagagttgccagcaaaggccaatggtctgtgggatccccaagatccccaggggacaagcagcttgcctggggggtggggtcgtgtggtgtgggaagcccaagaagaacttagctaaagacccaccatgacagacaaaaggagggggcagagaaggcagtgcctgtgaggcagtgggagagcagggatagccacatcacaaaggccacaggagagagtgtccaggagcctgaaggggcagactgtggtgcccagagcagtggaggtagaggatggaggccgaggagaggtctcaggagagagcaagtgggcctgaaaatggtagagggtgaaagctgcactgcagtggaggaatgaaaagagcagtgaaagaggctgctaggaggtcctagagcagccagaagatgggggaaggttggggggcagaaggctagccccccaaatggagggcctctgcaacagctatggcaatgacatagcatgcacacctccattgccccttgcagcatccatagcagacatcactaatcacactcgtggcagacatcactaatcaatcacagcactctttccctgtgatcacaaaattgcagacttcaggtctcagaatctttctcaactgagtcctccaggccaccatgccctaaggaatgaactcagacactttttgatgcttattctgctgcaccttgactccccagcagtggggaactcactaccttctgggctggcctgttcaatctttagataattgtgcttgtcacatcatcttgcagggtggcgtctgttagtcgcctgctctgagcagattctggtggagggcccagcttcttcccagcccttttcactcacccacacactgggcccactgggagtgctgggtgaaaccctgggggcagctgcagcggtagccccctagctggttctgacagccatgctggcagcggtggggcccatcacattcattcacatctgagacatagagagagggagagagggtttaccagacggctctcaggaccaacacccccaaacactagaccccagccaaagctgggctgtaccttcacagccatggcctgagctgaccagggtgaagccttggtggcattcacagcggaagctgcccggggtgttgtggcagtgcccgtgggcaccacatgggccaggctgggctgagcactcatcattgtctgcagaggagagagatcaggcagggttgcctgctggttaaggaactcgtgtcaggtgacacaatgccagtcccaccactgtgtggcttcaggcaagttgctcaccctctctgtgcctgtttcccactctgtgaaatgagatctgtaacagttcctgactcagaataggcaccaatgtttgagatcctgcacataaagaatctcatctccaccgcctcgaagctgtgtgtccttgggcaacttacctaccctctctgtgcctcgatgtcctcagctgtatatggagatgataatgtctacctcattgcatttttgtgtgcatgcgagaattaaattaacctaatcatgtaaaaggcttagggcagtgcccggtaaaagagtaaaagataaacaaagcctcttttccttctcccatggaaaaatgacatagggttgcctgttgagttttgttcccatggaaacctgacaatagtgtgaggtcagccggtgccatggattgaatgttcgtgtctctccaaaatcctatgttgaagccctaacccccagtgggctggtatttggatattaggtctttgggaggtgatcagggttagataaggtcatgagggtagggcttttatgatgagaatagtgcccttataagagacaccagaaagcttgctctgtctctgccaagtgaggacacagcaaaaaggtggctgtctgcaaaccaagaagagagccctcacagaaccagccgtgctgccaccttgatcttgaactgcccagcttccagaatggaaaaaaaaataaatctctgtagtttaagccaaccagtgtatgggttgtccgtgtgcgtgtgtgtgtgtgtgtgtgtgtgtgtgtgtgtaagctattgttttaaactgaatagtctgtgatcatctttctatgtctttaaatattcttactattcttgggggctgggtacagtggctcatgcctgtaatcccagtgctttgggaggcctagggagcctccggatcacctgaagtcaggagttcgagatcagcctgaccaacatggtgaagccccatctctactaaaaatacaaaacaatttagccaggtgtggtggtacacgcctgtagtcccagctactcgggaggctgaggcagaagaatcgcttgaacccgggaggcggaggttgcgatgagccaagattgttccactgcactccagtctgggtgactgacagagtgagattccatcttaaaaatatatgtatacatacacatatatatatatttttcttactattcttatttgcataattttaaatggccaccacatcttcacttggtgtggatttgctctgcttcatttaaccaactgttaattttggtttttttagataggatctcattctgtcccctgggctggagtgaagtggcacagtctcagctcactgcaacctccgcctcctgggctcaggtgagcctcctacctcagcctcctgggtagctgggactacaggtgcacaagaccatgcctggctaatttttgtatttttagtggggactacgttgtccactatgttgcccaggctggtcgcaaactcctgggcacaagagatcctcccaactcagcctcccaaagtgctgggattacaggtgcaaaccactgcgcccggcccagtttttggatttgaatttgctaaatcccacacttgcagtctatggtattttgttatggcagcctgagctggctaaaatggccaggttgctacgatggtaggagggcattggtacaatggccagagagcattgctacaatggtgggagcccatggctggtatactgcatttgaactgggattttgaggaatgaacaacaaattcctggtggaaaatcctgcttttagcttccttgagtacagagattcttgacactaagcacatatctatggagatgtagagtctctcttggggtcgggcacagtggcttatgcctgtaatcccagcactttgggaggccgaggcgggcagatcacctgagcatgggagtttgagaccagcctgaccagcatagtgaaaccccatctctactaaaaatacaaaaattagctggatgtggtgctgcatgcctgtaatcccagctacttgggaggctgaggtgggagaatcgtttgaacccaggaggcagaggatgcagtgagccacgatcacgcccctgcgctccagcctgggcgacagagtgagactctgtctcaaaaaacaaaaacgagcaaacaaaaagtgaatatctcttgggaacaacagacatgggaacatgaagcttctaagtaggagtggcccctgcggctgcctgagctgtcacttgaggggccacagagaatagctctagactctggccagaagaaatgtctggcacagccaggcaccgtggcctgcaatcccagcactttggaaggccgagatgggcagattgcttgagcccaggagtttaagaccagcccgggcaacatggcaaaaccccgtctctacaaaaaatacaaaaattagccgggcgtggtggcacacacctgtagtcctagctacttgggaagctgaggcaggaggatcgcttgaacctgggaggtgagattgcagtgagctgagattgcaccactgcaatctccagcctgggcgacagagcaagactccatctcaaaaattaaaaacagaaatgtctgccaccacccacaatttctttcccttacatctagcaaagcaaaccaagtgtcaggctggcctactgtggccatgtgagtttgctcttctattaacagtttagtcattagcagacaggaacaccctgagacaaaatccaagccactgtctgttgtatcaataaagtttattgggacacagacacggtctttcatttacgtatctctccagctgctttgatgctagcatggtagagtccaatcgtggcgacagagaccatctcaactacaaagctgaaaatatttactcctcttgagccctttgcagaaaaagtttgtgacttttgatcaagttgagcctcacaccaccatctgcctggctgagaatttaaactcatttctagtgagagaagcagtcacgtgtgaccttgctccacggatgttacccatgtgatgcacggccctggtccatgcagctgctcacacatccagtgaaaaccttactttttttttttttaatagagatggggtctcactgtgttgcccaggctggtctcaaactcctgagctgaagcaatcctcctgcctcagcctcccaaaatgctgggattacaggtgtgagccattatgcctggccacagactttaatgttgcagagaaacagaaatgcctcttgtttcaagagtctttgttcaaatgttctctctctctctcttttttttttttttgagtcttgctctgtcccctaggctggactgcagtggtatgaacactgctcactgcagcctcaacctcctgggttcaagagatcctcccacctcagcctcctaagtagctaagactacaggcaggtgtcaccacctctagctaattttgtattttttgtagagatggagtcttgccatgttgcctgggctggtctcgaactcctggccctaagccatcctcccaaagtgctgggattacaggcatgagccacagtgcccagccaaatgttctcttttggtgatacttgacctgatccctctcttaaaactgaagccctctcaggaggctgaggtgggaggatcacttgacaccaggagtttgaggcttcagtgtgctgtgatcacatttgtgaatagccactgtactccagcccgggcaacagagtcattaagagactccatctctaagaaacaaaaaacaaaacaaaaaacccagatgtggtgagcctgtagtcccaagtactagggaagctgaagtgggagaattgcttgagcccaggaatttgaagtttcagtgagctgcgatcacattgctgtattccagcctgggtgatggagcaagactccatctctaaaacaaacaaacaaacaaacagacagacaacataaccaaaaacaaccaccaccaaacctctccctaccctccaaaacaaccctgtggccctctccttctttcctgaactcctgcttttactttttctttctttcatgacacacatcacctttgaacacactattctgttaattgtttgtttgtttgtttgtttgttttcgagacagagtcttgctgtgtctgagtgcactggcacgatctcggctcactgcaatctccacctcccaggttcaagtgattctcttgcctcagcctcccaagtagttgggattacaggcgccaccaccacacccggctaatttttgtatttttagtagaaacggggttttgtcatgttggccaggctggtctcgaattcctggcctcaagtgatctgccagcctcagcctcccaaagtgatgggattacaggcatgagctaccacacccaaccacaccattctgttaatttcttgttatgtctgcctctagtcttgattctgtgctagaaggaaagttccatgatggaagatccctgccttttatgtttgttgctgtacccccagggtctataacagggcccgacaaaccatttctgtttctgtaacaggctctgtcccaagactcttctctgccaatatagtgcaaaagcagccacaggtgattgtaagcaagcgggcttggctgtgtgtcaatcaaactttattaacaaaagcaagcagggggccgggcttggctggcagcctggagtttgccaccctttggtctagagcactgcctggtacacagtaggtgctgtctgggcagattagtgggcgcgtgaaaggggccacccttgactaggctctgcctttggggaagattgtgttccctgggggccacgagacactaagaaacaatgatggtagcagatgcccttgtggctttagctgttgaactgatttcctcctgggactatgtgagacctgggatttcaggagcgctctggggaggctctgggagggagatccagcagggacttgtcagggggaaggcaagatgccataagccaaggcgagagggcctctctcctcccaaaggagaggaaggaggttctagatgcctccaggaagcgagcactaaggaagtaacgactttgttctgatcacccccatgtccccaatgtccaatacacaccgggtgcttgatactattttttttgagacagagtttcgctcttgttgcccaggctggagtgcagtggcatgatctcagctcactgcaacctctgcctcccgagttcaagcgattctcctgcctcagcttctcggagttgctgggattacaggcacctgccaccatgccaggctaatttttttgtatttttagtagagacgggttttcaccatgttggccaggctggtcttgaactcctgacctcagatgatccacccgcttcagctttccaaagtgctgggattacaggcgtgagccattgcgcctggccaacttgatatttttttggtgagcaaaataactaatgctggggtcatgggtcacctcccggtgaggggcaagggtcactcaccgaagcaggcctggtggtgctgggtgaagccgggcggacagcggcaggtgaaggcgcccacagtgttgacacagaggaactgacagttgtgctgccgggaggtgcattcgtccaggtctgcagcacggatggtccagcaggctcagggcagggcccagtgggggattaggggcttcccaggggctgcccttgccacctccaggcagaggggtgacaagagaaagacctcggagatggtgcttgactccatgcagatgggagggggtgagattgcaggggacatgtcttgggcatccctttggggccctagactgcatgcagtggtgggagtgggggagagttgaaaggacatcacctttgcaggtcctgccatcctcctccagcaggtagcctcggggacagctgcacaggaaactgcccttcgtgtttttgcagaggaaggtacatggcttggggacctggctgcactcatccatatctggggaaggacagcgtgggtagtggggcggggttagacagacattccctgggggtgttcagggactgaggtctccaccagaccccgaccatctgaaatctgtggacttacacaggaatgaacacttctttctgcaaaaagccaggtgggaaatacatttggttttgcaggccacaccatctcagatacaactactccatgtggcctttgtactagcaaagcagccattgagggtaagcagacaaatgtgcatggctgtgtgctaataaaactttattgacaagaacaaatggagggccagacttgaccctcgggctagagttttcttcccgctgacttagatgtacgcttgctacaaaacacaactgaaaaatatcaggatgtgcaaaataaaaggaagaaataacagcaggaaagtggcccaaacagggtgggggtgggagaacgaaaggatcctccctccctccctccctcccttccttgtttctctctttctttcttgagacggagtctcgtttcatcacccaggctggaatgcgatggcgcaatctcagctcactgcaccctccgcctcccaggttcaaacaattctcctgcctcagcctcccaagcagctgggattacaggcacataacacctggctaattttttttctttttttcttttttttagtagagacggtttcatgatgttggccaggctggtctcaaactcctggcctcaagtgatccttctgcctcagcctcccaaagtgtgctgggattacaggcgtgagccacctcacttggccttccttcccttccttcctctccctttctctctttctccctttctctttctttctttctgtttctttctctttctttttgtctctctctctttcttttttctttctttctcttctttcttctcttttttctctttctcccctttctctttgtttctttctctctctctctcttccttccttcccttcccttccttccttccttccttccttccttccttccctttctttctctctttctttcttgacagagtctcactctgttgtccagactaaactgcagtggcatgatctcagctcactacaacctccacttcctgggttcaaacgattctcctgcctcagcctcccgcgtagctgggattataggcatgcaccagcacgtgcagctaattttcgtatttttagcagagatggggtttcaccatcttggccaggctggtcttgaaatcctggcttcaaatgatgtgcccaccttggcctcccaaagtgctgggattacaagcatgagctactatgcctggcctgtttttttttttctttctttcttttcttttgtttttcattttttaagagacagggtctcactctgtcacccaggctggactgcagtggcacaatcagctcactgcagcctcagactcctgagctcaagcagcctcccaagtagctggggctacaggcgcatgtgggactacaggccaccatcctggctaattttttttagcgatggggtcttgctatgttgctatggaactcctggtctcaagtgatcctcccacctcgacctcccaaaatactgggattacagtagcgagccatcacacctggccctcagttgtctgtatggtttgggcaccactttgtaaatgaaagcctaacattgcaaagtggaaagtctcagggaagttgagttcaggggctgcacagaaggtggccaggctgggccaagggtgcaggtgcagagggctgggctcacccaggcaggtagtagcagtagcatccggtgtgtacccggcctgacagtggcagcggaaggagccaaggctgttgatgcactccccatgagcacacaggtgagcaagcatacggcattcatctacatctgggaaaaagtagggtgcaaatggggctggctggctgcttcgcgcctccaccgaggaatgtctccttctctctgcccagcagccgtctcctcggaggaaagtccagcctcccttccacaccggccactgcaccccagcccacgtggaccccatcctcaggctgcggatgacacctgagcccgcaggacacgcccatgaagcttccagggaaggggactcacacccacccctccccagcctcaacagcgacacctcctcagtgcaccaacatgcagaacagagacacacagtgcatgcaacatgatacactagccacacacctagatgctcctgcagaaacacgggaacacacgccaacactcagggactcccgagtctccccccagccacacccccaaaaagccatttcctccccagtcctactattttttctttttttttttttttgagacagagtctcgctctgtcgcccaggctggagtgcagtgacacgatctctgctcactgcaagctccgcctcccgggttcacgccattctcctgcctcagcctcccaagtagctgggactacaggcacctgccaccacgcccggctaattttttgtatttttaatagagacagggtttcaccgtgtcagccaggatggtctcaatctcctgacctcgtgatctgcccgcctcagcctcccaaagtgctgggattacaggcgtgagccaccgcggccctccccagtcctgttgatgccactgctggtcacatggataacccatctcactatcagtgacacactcagtgagacgcactgatgtccttatgctcgctcacacgcagacactcacatacctgcccttgtacactcacccaagtccacaacacacaggccgctggctccctctcactgccttctacttcacagatgaacatggtgtatacttctcacccagctgacacacacagacacacaccagctcccacgcagtccggaacgagctctcactcacaaagaacacacactgggccgggcgcggtggctcatgcctgtaatcccagcattttgggaggctgaggtgggcggatcacttgaggccaggagttcgagaccagcctggccagcatggcaaaacctcatctttactggccatgggagagccagcctctcccacggccccaaagagatcctttgggtctgttaaggccctcttgctttttatttttatttatttatttttttgggacagagtttctctctgttgcccaggctggagtgcaatggcgtgatctcgtctcactgcaagctctgcctcccggattcaagggattctcctgcctcagcctcccgagtaactgggattacagacacacgccaccaaatccagctaattttttgtatttttagtagagatgaggtttcaccatgttgaccagggtggtctcaaactcctgacctcaggtgatccggccgcctcagcctcccaaagtgctgggattacaagtgtgagccactgtgcccggcctatttttattgcttttggagacgaggtcttgctctatcacccaggctggagtgcagtggcactatcttagctcattgcagcctcaaattcctgggcttaagcaatcctccttcttcagcctcccaaagtgctgggatgacaggtatgctactgggaggcagaggttgcagtgagctgagattgcaccactgcactccagcctgggtgtcaaagtgagactctgtctcagaacacatacacacacattggctcacacaactgctccctcaaccccccgagttcttccatgcatatggtgcacacgtactggttctcatatctgctagcacaaagacacacacacacacacacacacacacacacacacacagtgtggctcacacattccagcacctgctgcagtacagacacatgaccctgagcaaactcccccgtttcttgcctccctgggggtcctgagggcatgggcacccacctcggccctcagcagtgtagcctgagccatgggggcacagcttcctgtaggcagaggtgccgggcaggggacagagctcgcagcggggcccccagccccggccacccccacagcagcactcggccctggtgacagcctcactgctgctggacagagaccggcacatggtctgcagcacctcggcaaagcagggcccctgccggatgtctgcagagaacaatgggaaagacaacggtcactccaggaggctggtttgggggcaaagactgagcttgctttggggcaagctgtattttgggggtgttggggacaggggtgtccaggagggagttggatacacaggacagatggccctagtgggtcaccggctggggttagctccccagaagtgggagatctggggaaggttggttccggggtgtggcgccagtaagttggaggaggcatggagggagcgtcccgctcttccagtatttaacagaagggacagagggaagaggggcagcaggggagcactggacatgtgtgtccggattagctcagcaaccccctgggttgcccgtcagtgccgcaggccccgtccctgccttggagggctcccagacagtgggagggacaggcagtgggagggacaggcagtggggggacaggcagtgggagggacaggcagtgggagggacaggcagtggggggaacaggcagtggagggaacaggcagtgggagggacagggagtgaagggggcaggcagtggggggaacaggcagtggggggggacaggcagtgggtgccacatggtaggtggttgcaaccactgtgcgtgtccagccacactcaccgtggcactcggtaagggtggggctgggctggaatccctcatcacagtcgcaccggaagctgcccgcggtgttgacacagcggccgttgacacagaggtcaggctgagcgtggcattcattgtcatctgagatgggaggggtgaggcaggtgggcggggaggccacaggcagccagcctctcccacagccccaaagggcccctttggatctgcccaggccctcttgcttatttttattttatttatttttattattattattattattattttttgagacagagtctcgctccgtttcccaggctggagtgcaattgcctgatcttgggtcactacaacgtccacctcccgggttcaagaaattcttctgcctcagcttcccaagtagctgggattacaggtgcccgccgccacgcccagctatttttttttttttttttgtatttttagtagagacggggtttcgccgtgttgtccaccctgttctcaaactcctaacctcagatgatccaaccgccttggtctcccaaagtgctaggattacaggcgtgaggcaccgtgcccagccttattttcatttttattgtttttggagatggggtctcactctgtcgtccaggctggagtgcagcggcactgtcctcccactgcctgtcacctccactacctgtccctcccactgcctgtccccccccactgcctgtccctcccattcattgaagcctcaaattcctgggctcaagcgatcctctcgcctcagcctcccaaagtgctgggatgacaggtatgagtcaccgtgcccggtccaaccctcttgctttgacctctcccttccacaaggagtttcctgcacccatgaagctccagtgccccatacctgtgcagccctccccagagccaggcaggggccgcatgcctgggggacagacgcacgcgaaggtaccgatgaggttcttgcactccatgccccgggcgtggcagtcctgctgaccatctgcacactcgtccacatcttcggatgaccagagacagatggtcagtcaaggccaggcaccctatggctgtggggacctggattccaccctgcgtcagccctgtgggacctgagtgagttccctgcagaccctgtcaaatgtctatccctcttaggaagggagcccccagctcctgcccagccccagcctccaagaagctgagggaatcaggaattgtcccccaaagcttgcatcccctgcccatgtcagggtctgtgagtctgctcatggcccctggaacactgaccctgaaacagccccagagacactgagtcccagaccagggtctcccacgcttgacactatgaacatttgggataggaaagttctttgcggtgggcggctgttctgtgtgcattgcaggatttttttttttttttttttttttttgaggcggagttttgctcttgtcgcccaggctggagtgcagtggcatgatctcggctcactgcaacctccgcctcccaggttcaagcgattctcctgtctctcagcctcccaagtagctgggattacaggcgtgtgccaccatgcccagctaattttgtatttttagtagagacagggttttaccatattagtcaggcctacctcgacacatggccccatcctcccgcagggtgtagccggctggacaggtgcacaggtaggagccctcggtattgtggcagcggaaggcacagagcagcgggttcagggagcattcgtcgatgtctggggaggccagtggaggtgccagctgggtagggactgagggcgggacctccactccctcccccaggcatctccgtcacacggcccaggtcctgggcaagcagagttgtaccctcgcaggtcatcatgaggccaggctcaaagccgtcagcacaggcacattcgaagcctccgatgacattggtgcatgtcccttgcccacaggggtggccgacagagcactcgtctgtgtctgggtgggagtaagggggtggtcagcacctgcagagggtcccccatcctcagtagcatcccatctgcctgcctgttgaccaccacagatcggagggggccagatcgaatgcacctctagtctggctatggggcaggcaagcggtatgtgtttagtgaatgaatgagtgaatgtgtgagcaagtgggcaggtaaaggaatgcatgagtgagcaagggagtgagtgaatgagcaagaagtgaatgaatgagccagtgaatgaaggagtgattaaaccagtaactgaaactgaggcaggagggtcatttgagcccaggagttccaaaagagcctgggtaacatagcaagacttcatctctaaaaaacatataaatgagtaagtgaatgaatggttaaatgaataagggaatgagtgagtaaaggggtgaatgagtgggtgaattactgagtgagtgaatggagaaatcagcaaggaagtgaatgaatgaacaagagggcaaatgaggaaacgaatgagtgactgaataagtgagtgaaagcatgaatgaatgagcaaaggaatgagtgagtaaatgaataaatgagtgattgaatgggtgaatgagcaaggagacaaatgaaggaacaaatgaatgagtgaacaaacaagcaagtgaatgaatgagggagcaaacgagtgaatgagtgaatgagtaaatgaatgagtgagtgaatgaatgagccagtgaataaatgaggtgtgaatgaatgagggagtgattgaatgaacaagtgaatgaatgaacaagcgaaggaatgagtgagcaaaggagtgaatgagtgagagaattagcaagtgaatgagtgagggggcaaatgagtgaatgagtgaataagtgagtaaatgaataagtgagtaaatgaataagtgagtgaatgagcaagtgaatgaatgacgtgtgaatgaatgagggagttagtgaattaataagtgaatgaatgaacaagtgaaggaatgagtgagccaaggagtgaatgagtgagtgaattggtaagtgaatgaataagggagtaaatgagtgagtgaatgagtgaatgaatgagaaaatgagtaagtgagtgagcaagtgaatgaatgagtcagtaaatgaataagtgaatgagtaaatgaataagtgagtgagtgaatgaatgagcaagaaaatgagtgagcaagtgaattaatgagtgaatgaagcacagagggagaaaaagtgaatgggggagagaggcagtggttaaggacaggatctcacccactgcctgggggtgtcttccctgccctgctctgctccttcctgtcctgggaggggcctgggacagagctggggaagggctggccactcacccacacagttgatgccagtgaagtccaggctgtagccaaagggacactcacagcggaaggatccatcggtgttgacacagacgccgttagtgcagacgccagggttctctgcacactcattcacgtctgcggatggcaggcgttgcagacatggcttctgtcaccacacaatcgccagagccctggccacactcaaggccccaaggggacaaaagcccaagccccaggctggcagggtccagggccacccaggctctcagggggagcctgaaactcagagacccaggcagtgcggagatggatctgggtggcccagaaggggctcttagcatgtgggtgaggggctcaccttctcgggagtcatccgggcctgggactgccccgtggccaaaggggcagagctcctgaaaggcagctggacggagagggggaggggagtcagagtcagggcctaggtgcagcccccaggtgtgtgcagggaaggatgagagaagaatgagagaggaaggtgagggcacatcatccagggagcctggacaggggtgggcactcaccgctgccctcctggggacacagttcgcaggggtctccccagccctccccaggcctcttactgcagcagcagcgggtcttggtggtgttgaaagctttgggcaccgagcacttcccagcctcaaaacgggtgaagcagaaactctgccgtgtgtctgtggggtgggggctccattaccctgattgaaagccgctggcagtgcccacctgcccctgtgacctcccgcaccccagtcctggtgaatgggttgtgctgatcctgccagtggccaatcagaacatgccatgcccctggtcatggtgattggtttgagtatggacatgtgacctactctgggccaatgaggatctgccctgggtttttagttgttgttgttggtggtggtggtggttttttttttttttcagatggagtcttcctctgttgaccaggctggagtgcagtggcacgatctcagctcactgcaacctctacctcccaggttcgagtgattctcctgcctcagcctcccaagtagctgggattacaggcatgtgccaccacacccggctaatttttgtatttttagtagagacggggtttcaccacattggctaggctggtctcaaactcctgacctcaggtgatcagcctgcctcagcctcccaaagtgctggtattacagtcatgagccaccgcccctggcctgccctggggttttgaggggacagctggaatcccaccccacttcattgctttggggtgttctcatgccaggaagaaagatcaaacttggtggttactcttggatcaaaaaccccttcctggagaggcaaaacgactgattccagaaagcccgaggatccaaacccccaatccttggctctggacacctatcaagtcctcaccagcaggctggggtcccagcctcccagaacagcaaatattcgctgaggtgaactgcatgctctgctctcacccttattgcccctgacctgtgagagaacaggctggctcaagctgggtgaggttagcccacagtagacaaggctagcccagctgaaacggagccagcccagagtagtctaggctagctcaaactggacaaaaccagcccattgacagcctacagtcatgtgaccaatacaaggaaaacctaaataagcacacacctagctcagaatggaccaggttagccctccatagacatgacctctatagccaagaggttgctggcactaggataactctgctaatgcaaacagacacctctgcctggtcagagctcccaaagggtcacacaagaaaccacagccctcttttctgggcaatctgacccttccccgccccacttcccaccctcttccctaagccctgtgtggacttaccaaagcaacggtgcccattgtcagagaggacaaagccaggtgggcagaggcactggaagctcccagggctgttggtacaggtgccaaagaggcagaggttgggctcctctgagcactcgtcgatatctggaagggcagggacatgagctgggtggggggcaagtaggacctccatcagtggggagaggactcagctgtgagaagggacagatggagtgcaggtccagccaggggctgcagtggggctggggtcctgagagctcagtatgagcttcagcacgaggtgggcattgtgtgtgcacgtaggtccttcccggaaggcatctccagagtaaaggtcatggtcaggaatagttcatgattggagactgaaactgcacatagtacaacctctatggaaaacagtgtggcgattccttaaagaactaaaagtaaggccgggcgcggtggctcatgcctgtaatcccagcactttgggaggtggaggcgggtggatcaccaggtcaggagattgagactatcctggctaacatggtgaaaccatctactaacaatacaaaaaaattagccgggtgtggtggtgggcgcctgtagtcccagctattctggaggctgaggtaggagaatggcatgaacccgggaggcagagcttgcagtgagctgagctcataccactgcacttgagcctgggtgacagagcgagactctgtctcaaaaaaaaaaaaccaaaaaactaaaagtagaactaccattcaatccagcaatcctactactgggtatctacccaaaggaaagtaagtcattatatgaaaaagacacacgcacatgcatgtttatagcaacacaattcacaatcgcaaaaatctggagccatcatatttataaatgcccatcagccaacgagtagataaagaaaatgtggtatataatacaccatggaatactactcagccacaaaatggaacgaaataggcacagtggctcacacctgtaatcccagcactttgggaggccaaggctggtggatcacttgagatcaggagctggagaccagcttggccaacatggtgaaaccctgtctctactgaaaatacagaaattagctgggcattgtggcggggcgcacctgtaatcccagctaccaggagggtgaggcaggagaatcgcttgaacccgggaggtggatattgcagtgagctgagactgtgccactccagtctgggtgacagagtgagactccaccaaaaaaaaaaaaaaaaaaaaaaaaaaggaacaaaataatgtcctttgcagcaacttggatggggctggaggccgttattctaagtgaagtaactcaggaatggaaaaccaaatatcgtatgttctcacttataagtgggagctaatctatgaggatgcaaaggcataataatgatataaaggactttggggacccccagggaaggatgggaggggggtgagggataaaagactacatactgggtacagtgtatactacttaggtgacaggtgcaccaaaatctcagaaatcaccactgaagaacttatccatgtaaccaaaaaccacctgttcccccataactattgaaattaaaataagaaaaaatagaaaaaaaaaatttaaaccttaaaaaaagaaaattgcacaaagctaactgagactggatatatttaccctacaccggacagggttaactcatgttgtactaagctagcccaaatagaatagatcagaataggccgggcatggtgactcatgcctgcaatcccagcactttggtaggctgaggtgggaggatcgcttgaggtcaggagtttgacaccagcctggccatcatggtgaaaccccgtttctactaaaaatacaaaaattgggcctggcgcaatggctcatgcctgtaatcccagcactttgggaggccaaggcgggcagatcacgaggtcaggagatcgagagcatcctggctaacatggtgaaaccccgtctctactaaaaatacaaaaaaatagccgggcatggtggcgggcgcctgtagtcccagctatttgggaggttgaggcaggagaatggcgtgaacctgggaggcggagcttgcagtgagccgagattgtgccactgcactccagcctgggggatagagtgagactccgtctcaaaaaaaataaacaattagccaggcatggtgatgagtgactgtaatcccagctactcaggaggctgaggcaggagaatctcttgaacccgggaggtggcggttgcagtgagctgagagtgagactcctctcaaaacaaaacaaacaaaaaacaaacaaacaaacaaaacaaaacaacaacaaaaaaaggatagatcagaagagcccaggccagactggtccacgttagctcaggttatacaaggctagcccagatggaagcctggatcagaggtattcaggccagactggttcaggttagcccaggctagcccatctgctcaagccagactggtccaggttagaccacagtgaacaaagcagcccatctgctcagcccaggctggtccaggttagcccacactctctgaggctagtccaagtggataaatggaccaaaggagattaggccagacttgttagtccagactgcatgaaatcatctctatgggtgattacaccggtgaagcttaggccagactggtccttgatctccagttagcaagtgaggagctctacatttgggtgcactgagaaacggtgagaccccacacccatgtcaatttataggattcatgaggaagcctgtgggcactagagacaaagtcctgagtgcagagtccagaaacaatcagaatgacaataatagtttatgaagctgtgtttgacgctgcgttaagtacatctccaccttcatcacaaccctagctggtattcccattttatggatggagaaagagaggcactccctggcgccagaaacgggagtggggctggacactcaccaatgcagtggtcactctgcacctggaagccagggggacagatgcagcggaaggagccctcgaggttctggcaagtgccgggtaggcaggttcctgcaaggctgaggcactcattggtgtctgtgaaaaggaggaagaaaggtccttgtgccagccaggatgcagggggctcacttgggactgggaccaacacctgcaatcactgtgtgatcactgagggccccaggacaagccctcccagtggcaattctggctccagggcaagggctgagactcaggacgacagggacagctggggaaggattatctgactctcgtggggttataggtggggcagatggtgtccagtggaaagaggtagcaagattcctaatctggcaccaccagcagattccttccatggtatctatttagcgcttctactattctttgcttctggaaagttacattttcaagacagcctcaccctacacaacaaaccccatacatagaaacataggtttgatgtgctgattttataattattttatttatttatttattttgagataggatctttccctgttgcccaggctggatgcggtggtgtgatcatagctcactgcatcctcaaactcctgggctcaagtgattctcctgccccagcctcctgagtagctaggactacaggcaatagccaccactcctggctaatttaaatttctttgtagagacgaggactcactatgttgcccaggctagtctcaaactcctggcctcaagcaatccttctgcctcagcctcccaaagtgctgggtatttttttttttaaatcttaaaataaatgcttgggtagtaaatggatctatgctcacccagaagtaccaaactgtggtgtacatggagcaggggctggctgagatgcctccgagcaccataggcagactcacccacacagttcttcccatcagctgtgagctcaaagccatcctggcagaggcagtggaaggaaccagctgtgttgaggcaatggccaaatcggcacacctgccccaccagggtagtacactcatcaaaatctgtagaggggagatgggcaggccagttcacccacaaaacttgaagggatcaaaccttccttgtacttctgtccacaactgagttgagctgacagcattggcttcaacttgagcactcatgtatagactatgtatattagccttctacctatcttatgaggtagttgctgatattttctaatataaccatgtaatgctatgaatttgcctctaagtgcccccttagctgcatcctatgtattttcatatgttatgctttcattttcattttcttttacttcaaaatattttctaattttccttatgatttatttgacctatggattatttaggagtatgttatttaatttctaaataatcggggactttctgggcatctttctgtggccaatttctagattcacttccttagattctgagaacccactttgtggccagcctgccacctgagccgactcacccacacaatccccattgtgtgtcaccacaaagccagggaagcagaggcagttgtaggagccaatgatgttcttgcaggtcccatttccacaaggctgccggtcacactcgtcaatgtctgcagaagcaaagccgagagcccaacccagctcacccagggcattggggaacttggggagtgagaggccagctggacctagcactcctcccctgcacctagccctgcctagatgactgggcagtgacccctggcggtgatggctgggaagtactcctggtatgatatatcacccccattttacagatgggaaaactgaggcacagggaggcagatcaaccatttacccaagatcttaatctcaggacccaaacttggatctctttgtgaactaggatggacagaaacaccacttccatcccaggggaggtttagaccccaggcagcctggcttgaaaaggagggggaagataagggtctcacccatgcacagggtctggtctgcagaggcctggaatccacggtgacacagacacatgtagctgccttctgtgtccatgcagtcaccatggctacagacattcgggatctcccgacactcattccgtcctgggggtgcagagagcatggtgttcccagggctcctaccacagtgtttgcctgagctctccctactgcaatggggaagccagaatctgccttgaagttccccactcaaacttccaccaggggcgtcaggctgtctgcatggacctgagctctcacctctatcacatcctattaacagacactctcaatacatcccccacccccctaatagtatagaaaaggagaaagacctggacagagccataccccatctaagtccccatgggtgacagagcccagctccctcacctcctcccagggaccctgctcacccacacaagccccgcctggcgacagtttgtaccctcgggtgcacttgcagcggtagctaccggggatgttgatgcagtcagcattctgctggcagggactctccctgctgccacactcatcgacatctgggaaaatacagcaaatgaggtgggggtgacagagaagcccatcctgacagaatcaaacgtgaaacccagtccactgcttcggagcaggtggtttctctggaagcagccagagctggagtaagggtggttatatgagatggaggcccttggaaaggtgttagcccattatacatacagggaaatggaggcttacagagttttagttactcgcccagattgcacagtggcggacatgcatcccacccaggccccagggctgggaacagggagaggtggcaccttcacaagccagcaggatgctgttgtagttgaagcctgcggggcactcgcagcggaaactcccgatctggtttatgcagatgccattggcacagatggcggggatctccccacactcatcaatgtctgcagaaggcatctgccatcaggggcagcccagccccctgggacttccagcgatgctgagcgaagggacccactagccctgcaatctggttgaggctgttgtggccacaaaccagcacacactcaagaaaatcttgctgtgaccaaaatacatccgctcacaccagaaagaggtgaggagtgggaggaaagacaagagcagagagactgtgtgtgtttttctcaattaaaaatacacacttcctgtgacccagcaaccctgctggaaagaaatggccttaagcgtaagcaggacagcggtatgagatgctatttagcaagaaactggaaacatcaactgatgaatgcagagcaaaatatgggatgtctgtaccatggaatattcttcagccttattaaggagtaaagccctgtaacatgtgacaatgtggttgaaacctaaaatcattctgctaagagaagccagacatgaaagaacaatattgcatgactccatttaaaggaaatgtccagaagtagcaaatcaatagagacagaaagtcgatttgtggttgccaggggcagaagggaggggctaaagggagagactgctaataggcacagggtttacttttgtgtgatgaaaatgttttaaacttagattgaggcgatggttgtgtaacactgtgaatgtactcaaaaccactaaagagggcactttaaatgggtgaagtgtgtggtatgtgaattatatctcaataaagctgttatatataaacaatctaaatgtccatcagtaggggactggaaacaacctaagtgtccatcaaaaggggacttgaaagaacctaagtgtccatcaatgggggactgaaaacaatataagtgtccatcagtaggggactggaaacaaactaagtgtcaatcaatgggggacaggaaacaacctaagtgtcaatcaatgggggactggaaataacctaagtgcccatcaataggggacgggaaacaacctaaacaggcatcagtgggggactggaaacaaactaagtgtccatcagtgggggactggaaacaaactaagtgtccatcagtgggggactggaaacaaactaagtgtccatcagtgggggactgggaacaaactaagtgtccatcagtgggggactggaaacaacctaaatatccatcagtgggggactggaaacatactaagtgtccatcaatgggggactgtgatgaaaatgttctttttgtgtgatgaaaatgagttctaaacttatactgaggtgatggttgcataactctgtgaatgtattcaaaaccactaaacagggcactttaaatgggtgaagtgtgtggtatgtgaattatctctcaataaaactgttataaacaatataagtgtccatccaaaggggactggaaacaatccacctatctatcaataggggactggaaacaatccaagtgtccatcaaaaggagatctgaaacaacctaagtgtccatcagtgggggactggaaattacctaagttcccatcactgggggacctgggatgtatctgcaccatgaaacacttttaggcagggcaaagagagaggctgcacagcagatagtaacctggccggttcttcaagacacaatttggacgaaaaaagcaagttgtaaccaacatgtcaagcattacatcatttacgtaaaatgccccagaaaccaatgtcatatattttcagtgggggacctattatgtaatgaaggaagaaaaaactagaaagaaatattccagccataaagcataagaacgtccagagagggagaaaagagacagagttgaggtgatgactggaggagaagtgggttttatttgtcatggtttgattttttttttttttttttttttgcaacggagtcttgctctgtcgcccaggctagagtacagtggcacgatctcggctcactgcaagctccatctcctgggttcacgccattctcctgcctcagcctcccgagtagctgggactacaggcgcccgccaccacgcccggctaattttttgtatttttagtagagacggggtttcaccttgttagccaggatggtctcgatctcctgacctcgtgatccgcctgcctcggcctcccaaagtgctgggattacaggtgtgagccaccacgcccggccgccatggtttgatttttttaaaaaataaggagaatatattcagaggattaaaacaaatgaaaatgaattcatcagttaaacactgcatagttgacatttgggatgcaggtgttaaattatgcaatacgttgttaaaaagggagtattctggccaggctcagtggctcacacctgtaatcccagcactttgggaggctgaggtgggtggatcacctgagatcaggagttcgagaccagcctgaccaacatggtgaaaccctgcctctattaaaatacaaaaattagccaggcatggtggcaggtgcctataatctcagctactcgggaggctgaggcaggagaatcgcttgaacccaggaggcagaggttgcagtaagttgagatagtgccattgcactccagcctgggcaacaagagagaaactccatctcaaaaaaaaaaaaaaagggcatggagcaatttgacacaaactgcaacacggatgcaccttgaggacatcatgttcagtgaaataagcctgacacaaaacaacaaatcctacgtggttccactcacaggaggtccctagaaccgtcagattcacagagtcagaaagtagaatggtgggttccagggactgagggggatggggagtgagagtttcatggggacagagtttcagtgggaggagatgagaaagttccggatggtgatagttgcaaaacagtgaaagtgtacttaatgccactgaactgcacactaaaaatggttcaaatgatactttctcggagacaaaaaaaaaaaagtcttactctatccctcaggctggagtgcaatggcgagatatcggctcactgcaacctttgcctcctgggttcaagcaattctcatgcctcagcctcccgagtagctgggattacaggcatgcaccaccatgcccagctaatttttgtatttttagtagagacacggtttcaccatgttggctaggctggtctcaaactcctgacctcaggtgatccacccacctcggcctcccaaagtgctgggatgacaggcatgagccactgtgcatggctcgaatggtaaattttatgttgcatatattttactatcattttaaaaaatggataatggtttaataaaaatagtgtcattctttttttaaaaagaagtgttattgagggcaggattcctggggagttggaggtgtgtggagcgaggaggaggggaggatggaggagtggatgtaaggaaaagagctgttgaggaggggaggggtgggaggaagcagacccaggtggatgggtgcccagggatagagcagggaccactcactcaccaaggggcttccccgtgtggatgtcagtgaggaatcccggggcctgatttccacacaggatctggtagtcagctgcgcaaaggggaacaaagctgagtctggggctgcaggcctgaccccagcccgctcccaatctggaggggacacctcatccctggagcccagccctcacctggccaccttgaactttttttgctctccccaccctttccctccttccacttatttaatttaatttttttgagacaaagtctcgttctgtcacccaggctggagtgcactggtgcaatcacggctcactgcagccttaacctcccaggttcaggtgaccctcccaccttagcctcccaagtagctgggattacaggcgtgagccacgacgtctggtttttaaagccacctagtttgcagtaatgttttgcagcagctctggggaatgaatacagctataagcccctagaagtccccttcccatcactgtcccattcctgcagctcctcctggtgcctgggctggctgctagatcattccaacaggactcattcctgctgtcaacacactctgttcagtcctgcctccaggccttggctcctgctgtgcccctgcctagaacgccttccctcatcctgaccgatgttcccatcagggtcccaatcttggctctgagcttctccaggtctgccccttccccagcccaggaggtctatggtatctctaaccagctgtgctttcctccctggcctgggacatttaccgaccccctcccaccctatcccagcccaggaggtctatggtatctctaaccagcggtgctttcctccctggcctgggacatttaccgaccccctcccactttatcccagccccagctactcctgtgaatcttcaagggcctttcccaccaatgaaaactccattgatccatcctgaattctcgaaatctgcaaaatggaagaaaagctgccttgctcactttaaaatattgccttccatacatggggactgacacagtttggctgtgtccccacctaaacctcaacttgaactgtagctcccatatccccacatgtcacgggagggacccggtgggaggtaactgagtcatgggggtgggtctttcccatgctattctcgtgatagtgaataaatctcgtgagatctgacagttttataaagggcagttcccctgcacgcgctctcttgcctgccaccatgtaagacgtgcttttgctcctccttcaccttctgccatgattgtgaggccttcccagttatgtggaactgcgagtccattaaagtcctcctttttttttatttttttattttttttttgagatggagtcttgctctgtcacccaggctggagcgcagtggcatgatcgcggctcactggaaaccccacttcccgggttcaagcgattctcttgcctcagcctcccaagtagctgggattacgggcctgcgccaccacacccagctaatttttttggtatttttagtagagacagggtttcactgtgttggccaggctgttttcgaatgcctgacctcaagtgatccacccgcctcggcctcccaaaatgctgggattataggtgtgagccaccacacccagccaaacctctttttctttataaattacccagtatccagtatttcttcacagcagtatgagaatggactaatagagggacaaaacttcaactctctggctctcatcagaacaaggaggattaatctaagaaccctaagggcactgtgtttccttaaccattatgctaggaggggccaggctgggaagaaggttggggagggttactcacgactgatgggagtggggcaggcctcacagggtctattccaggcctggccaatgttgtaggagcagcaacacattttccgggtcacgttgaaggccagctcattttgacatgtgccgttatagtgccggaagcagacactcttcctcatatctgtagttggcacaaaggagaagaatgtgggtaagggtcacctaaatcagtggaagagggagccaaagagataggaactccttaactgattcatttgaagattactggcttgtccaggcacagtggctcatgcctgtaatcccagcactttgggaggcggaggcgggcggatcacttgaggtcaggagtttgagaccagcctggccaacatggtgaaaccctgtctctactaaaaatacaaaaattagctaggtgtggtggcacacgcctgtaatcccagctacttgggaggctgaggcaggagaatcgcttgaacctgggaggtggaggttgcagtgagccgagattgtgccactgcactccagcctgggtgacagagtgagactctatctcaaaaaaaaaaaaaaaaaaagattactggctggcttgattggcttgatgtctctcccccaacacacttgggggatccattcacttttttcagccttttttgagcagtgcacaacctgagcaactgttcatggcagctctgggctcctgagtcctgcagctttgtttactgccacatgtcagcacttcatatatgcttaccctccctctccataggcttgaaggctcccagcagttcctcccatgcccaggtgctgcttctgtgactgccagttccctaggtcatcacgcttcttacccatgcagttgttgccaccattgacttggaggtactctgcagggcagacacaggtgtagttccccagggtgttgtagcaggtgccagggccacagatgccggagtgtgtggagcattcgtcaatatctgcagggaaagaaggggtggaggggaacagtgggcagcgtccaggaattgtctgaataactccactccagagacccagcaaggccacttcaccagggacctaagtttggtttcaaaatcagtttaaaacgcacacacatcttagtgatgaagaaagctataatatgggctgggcatggtggctcatgcctgtaatctgagcactttgtgatgctgaggtgggaggatcatttgagcccggagttcgagaccagtctgggcaacatagcaagaccccatctctactaaaaattttaaaaaattagctgggcatggtggtgcatgcctgcagtcccagccacttgggaggatcacttgagtccaggaggttaaggttgcagtgagccgtgatcacgcctctgcactccagcctgggtgcagaatgagatcctggctctaaaaaacaaacaaacgaacaaaaacaatatgacattaagtgaaaaaaaaaaaaaaaaaacatttacaagctggatgcagtggctcatgcctatcatccctgctttgggaggccaaggcaggaggatcatttgaggtcaagagtttgagaccagcctgggcaacatagtgaggtcccatctctacaaaaaatgaaaatttagctgggcatggtggcacacgcctgtggtcccagctacttgagaggcagaggtgggaggatcacctgagtccaggaggtcaagactacagcaagctgtgattacaccactgcactccagcctggacaacagagtgagacactggctctaaaaaaaaaaaaaaaaattcctaaaaataaagttgatgatgatactgcttctattaggaacaaaatgacctgagttcatgagtcagttttataatcaccaagaaaggatcatccatgtcttcctaatatgatatgataggaatcaaggaccttatggataaagtattcttgggggaaaaaaattgattctcaatctggtcattactctagtccaggggtagtaagctttttctgtaaagggccagaacattttggttttgcgggccaaactacagtgtgccatgattattcaatctgccaatgtagcaagaaagcagacacaaacaatatgcaaacacactgtggcactggctgtgctccaaggaaattttatttatggacccctgaaatttgaattttatataactttcttttcttttcttctttcttccttcttctctttctttctttcttctctttctttctctctctttctctctctttctttcttttattttttttgagacagagtctcactctgttgcccaggctagagtgcagtggcctcatcttggctcactgcaacctccgcctcccaggttcaagtgattctcctgcctcagcctcccgagtagctgggactataggcatgtgtcactatgcccggctaatttttgtatttttagtagagatggggtttcactatgttggccaggctggtctcgaactcctgacctcgtgatctgcccacctcggcctcccaaagagctgggattacaagcatgagccactgtgcccagtcttttttttcttttttttttttttaagacagggtctcgttctgtcacccaggctggagtacagtggcacaatcacggctcactgcagcctcgacttccgaggctcaagtgatcctcctgcctcagcctcccaagtagctgggattacaggcgtgagtcaccatgcccagctatttttttaattttttgtagagacaaggttttgccatgttgcccaggtgggtcttaaactcctggcctcaagcaatcctcccacttcagcctcccaaagtactgggattaccagcttgagctgccacgcacccagccttgaatttcatataattttcatgtgtcacaaaatgttattcttcttttggttttttcaaccgttgagaaaagtgtaataaagtattcttagctagcaggcaaaaataggtagtggaatattagcatggtaagagtgatgtcaccaaaaatagcagagcagggaactccagggctccattcctccacaaaagcaactattgagctggcaaaacagacaaaaataaacttttgcagaactctggaatcagtcaaaagcttacaacatccagacaaagatatggtgaagaaggaagctgctgtacttcataagggagtgtcgtggcattttaaagggtctatctaccatcccccacaccacagatccacagcagccatgaacatcttaaaggcagcaagagagaactgacagatcatgacaaaagaggaggcagggggcagaagcctttccatgaggccttccctcctctacccttgtgaggcttggcagggcaggaaggcagggagagagcggaagagcctgacccaccccaaagagaatccatgctcaccctcacagatgcgggtgtgctcactgaggtggtagccaggtgggcactcacactggaaactgccaaacgtgttgacgcagtcacccccctgacacagccctggcagctcttggcactcgtcgatgtctgtcaggaagtaaggaagccaagcttgggagctaaacccatgcagaggacttaaggggcacccacaccatgctctgggttctccagggccctctcgaggatccccaagtgctgtccatgactgatagacatttaaagggtctatcttgatggctggacacagattctcttgagttaatgttaccctaaattcaactccattcccttcatctgttagtccattctcccatccaccacatagtttcctctagatagagaaatagatagttttcttcctctagatggagaatagtcttctccaaccttgtcactccctatagaaaggatggatgggaggatggatgaatggatggatgagtggatggatgcatggatatgaaacagtggatgggtaaataagcaagtgggtcaatgaataagatgatgagtgagtggatggataggaaggtggatggataggtgagtagacaggcaaatgagtgaatgggtggataagtggatggatggatggatggatgaatggatgaatagatgggagatagaagatggatggaagggtggatgaatgggggaatagaaagggagtagggaacgggtggatgggaaatgggtggatggatgagtggatggatggatgtattgaggatggatgggtgaatgggggatagatggatgggtgaatagatggatagaagaatgagagataggtgggtgggagatggatggatgggagagtgggaaataggttaatggatgggtgaatgcgggctagatgaaggatggggggtggatggatgggtgaatggatggatacaaggatagcagagggatgagtgatgaatggatgaatgggtggatggggcatggttggatggaaggatggagggatggatggaaggatggatgaatggaaggatggatgaatgggtagataaaggatagttggatggaaggaaggatagatgaatgggtagatgggggatggttgggtggaaggatggatggatggaaggatgggtggatggaaggataaatggacagaaggaggggggatggatgaaaggatggaggatagatgaaggatgggggataaatgggtgaatggatggatagaaggataggaggggaataagtggggggatggatgaatgggtagatggagaatggttggatgggtggaaggatgaatggatgaaaggatgagtggaaggatagatgaatggatggatggtcgagtggaaggatggatggatggatggatggatggatgaatggatggaaggatgagtggaaggatggatgaatggatggatggtcgggtggaaggatggatggatggatggatggatggagggatgaatggacagaaagatgggggatagatgaaggatggggaatgaatggttgactagatggatggataaaaggataagagagggatgagtggaggatggatgaatgggtagatggaggatggttgaatggaagtatggaagtatggaaggaagaatggatggaggatggctggatggaaggatgtatggatgtactggatggatggaaaaaatggaaggatggatggatggatggatagatggatgaatggctggatggatgggtagaaggatggatgaatggatggaaggatgggtggatggaaggataaatggacagaaggatggaggatgaatggaaggatgggggacaaatgaaaagatcaataaaccaacaagtggaagaaatggctgaaagaacagataaaaaaaattaaacacaaactaaaagcatagtgtggtcctgctgctcagcctccaggtggaaagatctgccccatcccaggacaaaactactcaactctacactttggtgaggtggggatgagagaaaagtcagtctctaggcagacagatggatggatgatctgccaggaactcaccttccagaatgacagtgatgcggttaggctggaagccctcaccacccgggcacagggttctgtactcagctgtaaagggaaacaggctcctgtgaggtggggtattggggcaaagcttaggggaaacaggggagcaacagcaggaagcctgaaaagggctcaagagtgggctcccatccttctactgtactaacgacatccccatatctctttagcctcttggggccaagagactttggccagtcctggggctgcttgcgtgtgtgtgtgcatgtgcgtgtgcatgcgtgtgtgtgtgtaaatgtgggttcccattcaacatgtgagcagagttatgtggtagtggctgggggtaggagggagagaagattattccttctgatccaaaaccatatcctagtgtaactgcaagttttccccatgcaaggaagaccttggacattcacacacgcatacacctgaataggtggacaggtacctccctgtttcacacctgaggcctttgcacatactgttctcactgcattgcacatcattccccctactctgctaggaaaactcctacacatccttcaaaacctcactcaagcctcctcccctggaaagccttccccagagctttcacttccccacagctttctcctgagctatgggtatgcctcaaagaaaacccttaggacagttctactctcacagtcctgaaactgttgatttaagggtgagggagaagcagcgtgcagaggctgtggctcatccttctctgagtccccagtccccagcacatgacacagaggaactctcaatatttgttgactgactgagtgatcaagtgactataaacacagagaatttacagaaagcgaccttggagagaggcccagccaatgaactaccaagacgtacactgtgtgacccaggatgagcccctctcctcccccagttcttggttttcctgtcgcctaagccccccaccaccgccattagcagaggtgaccccctaagctcccgggcctcggtggcttaggtcacggtgttcaactgccccgcagggactcactggtgttggccatagggcacagctcacagggattgccccaagcccggcccagggagcaacagcaggaagctcgggtgacaccaactccgatctcggcactgcaggaaatgccactgtcccctcggtcatgcgtctccaggaaacagttcccggcccgagtgtctgaacaggcagaaggggatggttagtaggtgtcagagggaaagctgtatgtgtgcgtgtgcatgcatgtgtctatttcaacaggtgacaaggacaaccactcttgcaggagaccagcagatgtcccgtttgtcaggagcaggtagatttgaacacgttgacatctgagttaacccagtggggcaatcccacccacctctgctgaccccagaaccctgatctggagttgagcatggactcacccacgcagcccactccgctggggttcagctcaaaatcctgggggcagctgcagaggtagctgccgggggtgttaatgcacacgccgttgatgcagtttactgggtctgcacactcgttgatgtctgtagggaggaagcgcggtcctcagcagggagccccttcctcggcccccctccctcctagcttcatcctgggaagctacagccctcgctcaaggtcaactcctgggcaccagattgtgggacaatgtcatgtccttccctgggaagaaacctaaggggacaggagcctccagtctgtcctgtcccctccaaccccattccctctcctgctctgttctgcctggcagagttttgttcattgaactctacctgccctgggttccatgcagtcaacatatgaaaatcatatctattttatttccgtaatttattgatgtttagagacagggtcttgctgtgtcgaccaggctggagtgcagttgcacaatcacggctcactgcagcctcaaactcctgggctcaagcgatccttctgcctcagcctttggagtagctgggactacaggtgtgcaccacaatgcccagctaattttttatttttactttttagagatgaggtctcgctatgttgctcaggctggtctccaactcctggcctggagtgatcctcccacctcagcctcccaaagtgctgagattatgggcatgagccaccactcccagccaaaacccatatatagaaaatactttcaaaccatgggttagcaaattccaacctgtaggtcaaatccggtccaccacctgtttgtgtcaataaagttttattggtacaggggccacattcattcatttacatattgcttgtggctgcttttgagctacaatggcagagttgaatcattgtgacagagactgactgtgtggcctgcaaagccaaaaatatttaccacctgcccatttctaaaacacacagaggtaggagaccctttcagcagctagcgtggaggggccacttcaatcacagaacttatttagcaggcgaacaggaacgggaaatgatggggacatcaggcaaggcgccccccaccccccagcaagactgcaggggaggatgcttgaaaagagatctgagggcagtgagggagtgagccatgtcccctgccccaactcctgctctctcctctccccttccagcccagatgacctcacacctgtgcagttgccaccccctcggtccagttcgtagccaccattgcagatgcagcggaacattccaggcaggttctcacagctcccaaatgcacagaggttcccttgcgcacactcgtccacatctgcggggaccctgggtcagcctgccccacccagagtctgcaggggggacctacccactctgtcctctgccctggcgggcccaaccttaccctggcaggcccggtggtcctcggtggggtcaaagcccatctcacattcacagcggtacccgccgggcgcattgaggcactgcccgttgtcacagaggtccacgttctcggcacattcatccctgtctgaggggccccaagattcggagggctggaggccggtggaccaggacccacacagggtgggcaggaggccccagtcactggaacacttcgctgtcagccagagtcccaggcaagtagccctggggactcagtccctgacttgggggtgggaggcgagtgaccgaggcagggacagggaggggagaggtggtctggactcttggactccagagaggggacccagtctctctggatccagggaggagggcagccaggaaggaagcgtctcatgcacttaagtgttcaagggagccgtgggcaggccgcagcaccgcctgggccgaggacacagcctctccagcacccacagagcggcgattgagtcagaaggagtcaggaggtcgagtgaccatggcagccaccgtgaattcagcccccgtggctgtccctctagggcccctgccctcccacccctctaatctcaccttcgcagaagaagccatccccggcaaagccctggcggcaggtgcagcggtaggagccagggacattgagacagtcacctcttgggctgcaccggtgctcctgggagacgcattcatccaggtctgcaggagatggagcccagaccccccaccccatggtgtgtgcattgggtgggcgcagaagggagaaagacccatcaaccctccaaccctgactgcccccctgcagacactcccggatcccaccctcccactgccttgccccccaccgccttgccccccacctacctctactgctttgcccccactccctgcccccaggtactcaccgtgacattcgaagccatcccccacccagcctggcaggcacctacagctgaaactccccgggatgttgagacaggaggcgtgactgtcacagttgtgtcctccaacctcgcattcatccacatctaaagggagaggaggcacgacgccaagacccagtcacagaaggaaagactcgatgcaatagcagcggaaagggcagggactcttcctctctaggggagagctggcccagaaagcctcctcccattcacctggggagcttccatctttacccagagcccaagaggaaaaccccgaaacccaacagacatgactctcagcagccctcagaaatggcctgaaatagcagcatgaaagacttggggtagatattaagagtgactgtccagccgggtgcggtggctcacgcctgtaatcccagcactttgggaggccgaggcgggtggatcacgaggtcaggagatcgagaccatcctggctaatgcggtgaaaccctgtctctactaaaaatacaaaaaaaaaattagccaggcgtggtggcaggtgcctgtagtcccagctactcaggacgctgaggcaggagaatggcgtgaacccgagaggcggagcttgcagtgagcagaggttgtgccactgcactctagcctgggcgacagagtgagactccgtctcaaaaaaataaataaataaaaaaataaaaaagtgactgtccgtatgaacacgccccttttccaagccaggatttccctgtccaccagcatttccaatccagagtcaattatgcctcacccttatgatctctgccatgttaaaccttggtgagctgctgttactaaacatttctttcccacacttctgttttccctgacataaattgtgttttaaaagacaattttggatcaacatcaacaacctctaagaagtcataggcttgatgctctgttatgtaacacttgtttctaatacacattaaaataaccatgtaactggagtggatagaattgtgtccccttaaaaggtatgctcaagtcctaaaccctgaaactggtgaatgtgaccttatttggaaacagggtcttcgtagatgtaactaagttaagatgaggtcatcccggattagtgtaggctcccatccagtgatgagtgttcttttgagaaggctgtgtagccagatgcaatggcttacacctgtaatcccaactacttgggaggccaaggtgggaggatcgcttgaggcaaggagtttgagacgaggttgggcaacatagtgagaacctgtttctacaaaaacacttttttttccccctgaggcatggtttcactctgtcacccaggctggagtgcagtgcaatggtgcaatcatagctcactgcagcctggatctcctggtcttaagcaatcctcagcctcttgagtagctaagactacaggtgagcgccagcatgcctggctattttttaaaatttttatctcaaacacctgagctcaagaatccttccacctcaatctcccaaagtgctggcattacagaaatgagtcaccatgcctgatcaacaaacacttttttaaaaattagcccagcttggtggcatgcacctgtagtcccagatactcaggaggctgaggctgggaggattgcttgaacccaggagtttaaggctatgaactagttcatgagctatgatcacaccactgcactatagcctgggcgacacagcgagacctcatctttacaaattagatactactgggtgcagtgactcgtgcctgtaatcccaacaaattgggaggccgaggcaagaggattacttgagtccaggagttcaagaccaacccgggcgacatagtaaaacactatctctacaaaaaaaaaaaaaaaaattagctgagtgtggcggcacgtgtgggaggctgaggtgggaagatcacctgagcctggagaggtggaggctgcagtgagctatgattgtgtcactgcactccagcctgggagacagagtgagacactatctcacaaaaataaataaataataaataaaatgtaaaacatgaaaaataaaaaaaaatagatacacagagagaagaaggccgtgtgaagatggagacagagactggaatgacacatctacaagctgaggaacagcaaggaggcatggaacactttctgcctctgagcccccaagaaggtactaaccctgtagacaccttgatttcagacttctggcttccagaactattattctagaaggagaatcaatttctttttaattaaaaaaaagtttgtttttttgagatggagtcttgctctgtggcccaagctggagtgcagtggtgtgatcttggctcactgcaacctccgcctcctggattcaagtgatgctcctgcctcagcctcccaagcagctgggattacaggcgtgcgccaccacgcccagctaattttgtatttttagtagtgacggggtttcaccatgttggccaggctggtctcaaactcctgacctcaggtaatccacccacctcagcccccaaagtgctgggattacaggtgtgagctaccctgcccaggctaatttttaaaatttttaatatagatggggttgctgtctctattaatgttgccatatggccgtgttgtgatgtatccatgtcacccaggctggtctcgaacccatgggctcaagcagtcctcctgctttggcctcccaaagtgctgggattacaaaagtgtgagccactgcaccaggcggagaatcattttacttattttctttttttttttgagacggagtctggctctgtcacccaggctggagtgcagtggctcgacctcggctcactgcaagcttcgcctcctgggttcacgccattctcctgcctcagcctcctgaatttacttattttcttttgagacggggtctcactctgttgcccaggctagaatgcagtggtgctatcttggctcactgccacctctgcctcccgggttcaaatgattctcctgccccagcctcccgagtagctgggattactatgcctggctaatttttgtatttttagtagagatgggtttcaccatgttgaccagactggtctcgaactcctgacctcaggtgatctgcccgcctcggcctcccaaagtgctgggattacaggcatgagccaccgcgcccggcccagagaatcaatttctaagccaccaattgtgtgatcatttgttatggcagccacagggaactaacacagtcactattcaaatgtttaagtgttcatccctgtattgcatcaaattatgagggattcacgtttcagaaatgctgctgcagacacttggggcttcccttcctgagctgttcaggggaccccccggggcactgtataggactctgttcttgctttaacacaagaagccatccgtggaaatctatgagaatgaattctggctgtgctctgccctgggggatggaaacagaccccatgattcccaaaatggccccggggagtcccctctgcctgcaccgctgaccgccggctcaccagagcagcctgtggcccccttcctgaccatgtagcccagctgacagtggcagacaaaggaacccttcgtgttctcgcagtccccatggaggcagatgtgagggttcaggtcacactcatccacatctgttggggaagagagcatgaggtctgaggactgggtgcaggggtgacaggagaggaagtaggtgagggtgggagggagatcaccagcattcctgactgtcccgccgcacaggtcctctctgctaggactctctttcttttctccaggggcggggagctccctctatgtccactactgggcaattgggaatgttctgtgagcgtttcacagtgtacattccaaggaacacaccaggaatgtgtttccaaaagtattttatggtcaaatatatttagagaaggctgagatccacaaagctaaccagggtttcctcctgcaggacttttcagagcctttatgccaatatgcacagtgggtctgcaacaggggcatggagcagactgcattccctaaatgcatttgttcacaaggcccatcgctgaagcacttgctctctgagactcctataaactgcaactctctaagctctttaagcttcactcggtttcttggccgggagttacattgttacttcccggaacttccacactctggcctcagctttgtcctgatagggtatgcagtacacatctgctccccaggccctaggacaacctgtagccaggtgaggacagcagtcgccaccttagagaacagagttctgagtctctttcctgccttgtccactgtcctctgccagaaacccctttgtcttcagtgatcttaaagcacagcccttgaacaggacacaatcctctgatagatgttgggtatgtcatattaaacaaatgccatttaaaagagcaaggtttggggaattctgcttctgttatataaatgggatctcatgggctttggagagcagacttggggtgctggggacccttatgtggagaagcaagtgctgttacaaagcctcatcttcctacctgcgaatggcaggggtggggcctggcatttttcatgcctatgtgccaccttgtggaagacctggtgtgtgaattctgacactgcctcctccacccgccccgccccaccgtcccggctcctcaccaacacatgtcctcatgtctggcgtggccatgaagccatcatagcacaggcagcggtgaccccctggcatgttggtgcagtggccttggtcacaaacgcgggggttctcttcacactcgtccacgtctgggggagcagggttggggactgtgcttagctttgccctgatagaccacccagtacacatctgctccccaggccccaggacgacctgtagccaggtgaggatagcgatggtcactcgagtagtctgggggcgctcaagcagttctgaggttcttttccaccttattcaccctcctctgcaaaaatcccaggggctctcccacagggtgagcagcctgcctggggccaggaccacaggccaggcagggggtgcctcgggtctggctggcttcactatgctgtgctgggctctgggccagtgcaggacccagccaacacctcctcctcaccctccacaccaggcagtgggaagaagttgtgcccacctacctgcacatgcccttccgtcgggcatcagcgagtagccctgcccacagctgcaccggtagctgccctcagtgttaatacagtgcacgtcacacccaccattctggacccggcattcgttgatgtctgcaggatgcagggcagacaggggctggggctggggggaggggtccaggatggggagggggctggtttgggggtgggagcagagtggagttgaggtgaggacaggaggagctaccactatgtctgggactgtggttggtgcccaggggccagcaggtgggcacagtctcacccacgcagccctggcggtcaggtgtgctctggaagccggcatggcaggagcactggaaggcaccgatgacattgacacactggccatggggacacaggccatcactcagggagcactcatcgatgtctgtgggggagtgcaggtgaaagacgggcctgtgccccatctgccgtctgtgtgaccatgagacacactgggggcacacatgcatgctaaggagctcacactgccagcattggcacagccccgcatgtgcctatccgtacacttgcattcactcacatgcaaatacactcactctcctataagcacagacacccatatacacaccccacgtgcccgctcacacagactcacaaacacaccctggcacccactcacgtgtgaacacactcacccttgacagacacacacaggcacactcagatacacactcacactcaagtgcacactcctaaattcacaacacaccttatatccacttgcacacaaatacactcacccatgtgtaaatacacatccacacccaggggcacactcacacccatgtgcacacacagacacacaaacacccaatgcacactcacacatacacacacacccatgtgcacactcacacagacacacacataaacacaccctcaaacatacctgtccttgtgcaaacacatgtccacacccagacacccacacccagaggtacacccacacagacccactcaaacacattctcacacccactcacacacaaacacacctctataaacatgcatttgcatccaactacacatcacattctcttacacacacacacacagacttacgtacaaacacacccactcagaaattagccaggcatagtggcgcatgcctgtagtcccacctacttgggaggctgagatgggaggatcacctgagcccaggaggtggaggctgcagtgagctgtgattgtgccactgcaccccagcctggacaacagactgggaccctgtctcaaacaaaacaaaatgaaacacacctacgcacatgcaaacacacttgcccttggtagagacattcatagccaaatacacactcaaaccctcttgtgtgttcacacagacgcacacacacactcactcctcacatacaaacactcccccttgtacagacacacagtcacacaaatgcacaaacgcttgcccttgtacagacactcacacatgtgcgtgttcatctagacacacaaacacactcccgccatcttgcatataaacccacttacacacacagatacacacacacacttgcacgctcacacataggtatggcctcagaaagacagatacacatgcccaccctctcactcatccagcccacattcaccagacatccactcactttcacacacatgggctaacactcacacttgcacacccagatgcacacttaccctcacaggcagtgcccttggccgtcagctcatgcccagggggacactggcacttgtagctcccatccgtgttggtgcaagtgcctccccggcagagcagcgggtcccttgcacactcgtccacgtctgaaggtttgtgtggaaagagagagcaggcatgaaggtgctgatgcagggagggggtgatgaggctcatgctggcttctctccgccacctccccagcccccttcaccccagcgggagccaggagagcctggaggctccgggttgggatgacccaggggagtggggtctgcaccaggagcagagaccagccagatggggagggaggctgagattctcagaagaacaaaggccacgaagctgacactcttggggccactagaaacggcactaagaggccttcctccactccctgcaggacacgccagaaagctgaggctcagtcccgccaggactcagggcagggagcaggcagcctcgccatggcctcatcactcttcagccacagaggcatcatccttccatccctcaggcccaccccagggcctttgcacatgctgttctccagtgtcttcacccttttcacccccactccattctttctttctttccttttgttgttgttgtttttgagatggagtctcgctctgttgcccaagctggagtgcagtgacacgatctcggctcactgcaacctccgcctcctgggttcatgcaattctcctgcctcagcctcccaagtagctgggattacaggcatgcatcaccaagcccagctaatttttgtatttttagtagagacagcgtttcaccatgttggccaggctggtctcaaaatcctgacctcaagtgattcacctgcctcagcctcccaaattgccaggattacaggtatgagccaccgagcccagcctttttttttttttttttttttttttgagacagattttcacactgttacccagcctggagtgcagtgacacgatcacagctccctgcagcctccacctcctgtgttcaaactatcctcccacttcagcctcctgagtagctgggactacaggcaggcaccaccatgcccggctaatttttaaattttgtgtagagacggggcctctctatgttgaccaagctggtcttaaactcctggtctcaagcaatcctgtctcagccatctctcatcagatcatgtggcccttttaagggcttctgacagtggcaattttgcatttttttcttttcttttctttttctttctttctttcttttttttttttttttaatttggagacagaatctcgctctgtcgcccaggctggagtgcagtggcgcgatctcggctcactgcaacctccacctcctgggttcaagcaattctcctgcctcagcctcctgagtagctggacctacaggtgcacgccaccacacccagctaattttttgtattttaatagagacggggtttcaccatgttgcccaggctggtttcaaactcctgaactcaggcaatctgcccacctcagcctcccaaagtgctgggattacaggcatgagccaccatgcctggctttttcctcttccttccttccttccttccttttttctttagacagggtctcactctgtcacccaggctggagtgcaaaagtgcgattatggttcactgcagcctcaacctcctgggctcaagggatcctccctcctcagcctcccgagtagcacgcgccaccatgcctagctaatttttaaaaaactttatagtgacagggtcttgttatgttgcccaggctggcctcgaactcctggactcaagcaatcctactgcctcagcctctcaaaatgctgggattacaggcgagggccactgcacccagcccagttttgcatttcctcagcgattcatgttattcatgtctgtcttcctgttaggctgtgagctccaaggaaagagggctccctggagctagagctccctgcagtgcctctagctcagaggatgcatgtgaaatgctcatcaaatgaataacgaagtcaatgatggggacgagaggcctcataaccggcagtatttcccaggcttctctgagggtccctgtcctctacccaagctacacaccctccctgggagaccacaccccagtgtgccggccacccccaggtctcaggccccaggtctctctcctaaggacgaggcctcatggagcccagactcactgtacctcagctaatttacagctcctccctcctcctgccccctccatccacgtccacacagcaacagccgtccccaccctccctctcctcaatgccctccctgcccagggcgcccaccacacccctgcccggcagtcaccgacccatgcagttcttcatcagcatgaagccactctcgtagccgggaaaacactcgcactcaaagctgcccggcgtgttgacacaggtgccctggccgcagaggtcaggagagatgcgacactcgtcgatatctgtggggagagggggcagaggccggaggcgccatgtgggccgcatcatggggcacgaggcaggggggtccctgtcctttgatggaggtgtgggctagaggaagcccatctgcagacataaggaggcacaggccaagaggggaggcatgatgcaggcatgatggggtgccgtatggggtcatcgaatctgtagatatgacaggcagaacagaagcccccaaaaggagccgaggaaatggaggaaccccaaactaaacatgacaagggcaggcagttttctcacagacgggagttctccattttctttattttgatggtagatttgtttgtttgttttattttattttatttttattacttatttatttatttacttttttagagacagagtcttgctctgtcacccaggatggagtgcagtgatgcaatctcggctcactgcaacttctgcctcccaggatcaagcgattctcctgcctcagcctcccgagtagctgggattacaggtgtgtgccaccatgcccggctaattttgtatttttagtagagatggtgtttcgccatgttggccaggctggtctcaaactcctgacctaaagcagtccacccgccttggcctcccaaagtgctaggattataggtgtgagccactgagcctggcctgtttgtttttcactcaggctggagtgcagtggtgtgatcacagctcactgcagcctcaacctcccagggcctcaagggatccttctacctcagcctctcgaatagctgggactacagttaatgcaataataatttttttattttttgcagagatggaggtctcgctgtgttacccaggatagtctcaaactcttgggctcaagcaatcctcccaccttggcctccaaaagtgctgggatcacaggcgtgagccaccatgctggccctggaggcctctaaaggtcacctttgccagccccttcttttatgttttatttacttatttatttatatttgagacacagtctcgttctgtcacccaggctggagtgcaatggcacaatcttggcttactgcaacctccgcctcccgggttcaagtgattctcctgcctcggcctcccgagtagctgggattacaggcgcccgccaccaggcccagctaatttttgtatctttagtagagacggggtattgccatgttggccaggctggtctcgaactcttgacctcaagtgatccatctgccttggcctcccaaagtgctgggattacaggtgtgatccatcgcacctggcccagcgcccccttttttttttgagatggagtctctgtcgcccaggctggagtgcagtggcatgatctcagctcactgcaagctctgcatcccgggttcacgccattctcctgcctcagcctcccgagtagctgggactacaggtgcctgccaccacgctgggctaatttttgtatttttagtagagacagggtttcaccgtgttagccaggatggtctcgatctcctgacatcgtgatccgcccgcctcagcctcccaaagtgctgggattacaaatgtgagccaccgcgcccagcccagccccttcttttatagtcagggtccctgcagcccaaggagggcaatcacctgccctaggtcacacagcacagaggcagacacaagaagtgcccaaagaacaggtgttcgccaggcacagtggctcacacctgtaatcccagcactttgggaggccgaggtgggcggatcacctgaggtcgggagttcaagtccagcctgaccaacacggagaaacactatcactactgaaaaatacaaaattagccaggcatggtggcacatgcctgtaatcccagctacttaggaggctgaggcaggagagtcgcttgaacctgggaggcggaggttgcagtgagccgagatcgtgccattgcactccagcctggataacaagagtaaaactccgtctcgaaaaaaaaaagaagaagaaaaagaacaggtgttgtctctacgtcttatttgaggcccctatccctgccaaggatcacgctctctccaagaggcagaggtggcacctacctgtgcagttccgttcctgggcatccagggcgaagccccccgcacaggcgcagtggaagctgcccaccgtgtttctgcaggtaccgtgcgtgcagaggccagggaacaccttgcattcattcacatctgaagtacaggggcatcaaaccaccctgacgtccccaagctcaggatccatacaccaagccctccctgggttcttagtgcctcgccttacccacatccccttttcccccaaacacacttcccatctccaggcttttgcctatgccgtgcccctccccatccttccaggggcctgaccccttccccaaccgcacctttatagaatggtcggccagacaggaagtcccggctggcgaagcccagcccccgcgggcacaggctggcgaactccagagactcgggatccgggcaggcctcgcactcgactccccacacggccccgatggagcagcagcagacgtccatccggtacttgccaggcagggtgaccccacactcatcctcatcccatcgcaggaaacatggttccaatctcacatctgcacgggggacagtcactgcgtccccacccctgccacactgtgcccactgcgggacaggcgtgccgctcagtcactcccatcggaaactttctcccggacgtagtcaggtcgagggccagagtggaaaggggtgacttcctccaggcactgtctgggagggtactatgtgtactgttctgtagcactgttctaagcccctctatccatattttttttacgtgattgattcattggttgattgatttcttttgagacatagtcttgctctgtcactcaggctggagtgcagtggcacaatctcagctcaccataacctccacctcccaggttcaagcaattctccggcctcagcctcccgaggagctgggattacaggtgtgtgccaccacacccggctgacttttgttattttttagtagagactcggtttcaccacgttggccaggctgatctcgaactcaagtgatctgcccgcctcagcctcccaaagtgctgggattacaggtgtgagctaccgtgcctggccaatttttttttttttttttagacggagtcttgctctgtcccccaggctgtagtgcagcggcacaatctcagctcactgcaacctccgcctcccgggttcaagcgattctcctgcctcagcctcccgagtagctgggattacagacaccgctaccacgctcacctaatttttgtattttagtagagatggggtttcaccatgtttaccaggctggtcttgaactcctaacctcaagcaatccacctgcctcggcctcccaaagtgctggcattacaggcgtgagccaccatgcccggccactaaggatttttagggcagagaaactaccctgtatgacactacaatggtgaacatacgtcattatacgttcgtccaaacccatagaatgtccaatacaccaagggtaaaccctaaggtgctctatggacttagagatgacaatgctgtacccgtgcagtttcatccatcgtaacaaatgcaccttctaaccccagtgcaagatgttgagagttggggaggctgtacgtgtgtggaggtgggggctatgtgttcatatttgctgtgaacctaatactgtcctcaaagataaatcctggctggacttccagcactccgggatgctgaggtagggggatcccttgaggccaggagtttgagaccagcctaggcaagagagtgagaccctgtccctacaaaaatatatatagatataccaataaataaataaattagcgggtgtggtggtgcacacctgtagtcccagctgctcaggagatcaaggtacaaaaatcagttgaacccaggaagtgcaagttgtagtgagatgagattgcgccactgcactcctgcctgggtgacagagtgagaccctgtctcaagaaaaaagaaaaaaaaacccacccaaatgtctttcatgatatgttagccagaggcagaggatcccaaaggatgcctgaaatctctcctgttcaggccaggcgtggtggctcacgcctgtaatcccaacactttgggaggccgaggcgggcagatcacctgaggtcagaagttcgagaccatcctagccaacatggtgaaaccccatctctactaaaaatacaaaaattagctgggcgtggtggtatgtgcctgtaatcccagctactcaggaggctgaggcaggagaatcgcttgaacccgggaggcggaagttacagtgagccgagattgcgccactgcactccagcctgggcgacagagcgagactccatctcaaaaaaaaaaaaaaaaatctctcctgttcctcaagtcactgcgggtggagggaacaaaggaagaacgtgtggccctgtatgcggacctcgcctggactcacccacgcacagccggcctgaggcgtccagcatcaggccctctggacactcacagcggaaagacccagcagtgttgacgcaacgcccgttgggacagactcccgggaaggactcacactcgttcacatctgggtaaggaggagggaaagccggagggtccagggaggggaagggtgctggctggccattcccctggggtctcaagttgtccttgaggaggaaggaaggggacggggacacggggactggggactttcaagaaggcctggggaccaggtagggagaacgtctgtccccatcgcaaaagactccagggcggggccggaggtggcacccatgagggtggtgcgcctggttgtgtgcgggctctggagtagggggtgagctggacacgggcaggcagttaccatcgcaggtgacacccgtcatccgggcaaagccccgggcacaggcagggtctgcaactgggagaacaagagtgaagagaggagtcattttctcatgccagcccaaggggggacccgccccatggagggcttttcccatgggtgcctgggaggcctcaaggaggatactaccgatctcgcagcgttcgcaggggctcccccaggctgccccgagggtggcgcagcactcagaccgcaggctggctccctgaaggttcacctcacagcggctctcctggatcttcagccagcaggtgcccttggtgctgtctggggagaagaggcgggtcacctgtctcacctgccggccctacacctgcaccctgacccatagacgcccagcctctggaacgccgtcgggctccggggccgctcacctagacagaaggtaccagaggggtccagccggctgccagggccacatttgcaggtgtaggagccggccaggttccgacagacgccactcacacacgggctggacaggcattcgtcgacatctgtggggacagccccccaccaggtcctgagctgcaggaggagttgccttacctggccaggacccctcctccccaaggggccgccgcaaccggtggcacggggtgcacccagatgcacaagcatgcagagggcactggaatcaaatgtgcatgcaagcacatgtgtgtgctgagctgtgtgtgtacatgctgtaagagacaggaaatgccaaactgttttttttttgttttttttttttttttgagacagagtctcgctctgtcacccaggttggagtgcagtggcaccatcccggctcactgcaacctccgtctcccgggttcaagcgattctcgtgcctcagcctcccaagtagctgggactacaggcatgtgccaccatgcctggctaactttttttgtatttttagtagagacaggatttcatgatgttggccaggctggtctcaaactcccaacctcaggtggtccgcccgcctcagcctcccaaagtgctgggattataggcgtgagtcactgcacccagccaaaactgtattcttactctcaccttcaacacaacacagaatacatcagtgatcagacatggggttttttgtttgtttgcttttgccaagctgcccaattctccgacaccagcagggtgccctataattcaattctgacgctttctgcctggagttaaagtctgactccacaggttgagggctcagtcccacaagactgtcttccacaccagatgccagttgcaaatcggggcctccagaatttctgccttctcctcgggcttgatcatccgctagaggggctcacaggactcagggaaatacttaacttacgtttactagtttattataaaggatatcacaggctgggcgctgtggcttacgcctgtcatcccacctctttgggaggcagaggcgggtggatcactgaggtcaggagttcgagaccagcctggccaacacgatgaaacaccatctctattaaaaatacaaattagctgggcgtgatggcacacgcctgtagtccgggctacttgggaggcagagacaggataatctcttaaacggcgggagaattgcttgaacccaggaggtggaggttgcagtgagccgagatcgccccattgcactccagcctgggtgacagagcgagactctgtctcaaaaagataaaataaaaaaaataaaggatattacaaatgatgaacagccagatggaagagatgcacggtgcagggtatctgggaggagatgtggaacttccgtgcctgctctcggcatgccgccctgccagcacacagatatgtccatccacctagaagctctccaaactctgtagttcgagtaggacttctgggatgtgtgtataactgtgtgcccctgagtgtgtacaaccatgtgtgactgggactgcaagtgtgggaagtgtgagaatgagtgtatgggccaggtgtagtggctcgcgcctataatcccagcactttgggaggctgaagcaggtggatcacttgaggtcaggagttcgagaccagcctggcgaacatggtgaaaccctgtctctactaaaaatacaaaaattatctgggcttggtgacggacgcctgtaatcccagctacttgggaggctgaggcaggagaatcgcttgaactaggaggcagaggttgcagtgagctgagatcgtgccactgcactccagcctgggtgatagagcaagactctgtctcaaaaaaaaaaaaaaagaatacgtgtgtatgtaaatgtgagtatatatgtgtctttgagtgtgtatgtgtgaatgtaggtacatatgcaagtgtctttgagtatgcatgtctgtgtacacatgcacacagcatgtctgaatgtgtgtctgtgtatacacggcatgtgcagcgtgtctgggtgtatgtatgcatgacacatgcaacgtgcatgtctgagtgtggttgtgtacaggatgtttctgagcgtgtgcatgtgtgtcttgtgtacacacctcatgcaacatgtgagtatctgagcgtgtgcatatatgtgtgtgtgcacactacatatagcatgcgtgtgtgaatagaggtaacatgtaagcatctttgagcgtgtgcatgcctgtgcgtgcacacgccacatgccaagtatgttggagcatatgtgtgtgtgcaaacccacgtgagcccgggacccagtacctttgcagatctccgtgtcctgccagaagtggaagccgggggggcaggagcagctgtagctgccagggctattctggcaccacccgttgtcacacaggaggctgttgagggcacactcatccacgtctgtggggtgggggtgggagagaggggtgaggggtctgcagtgggagaggctgcccacacatccgcccgccaggtggcatgctcacctgtgcagtccttgcctgaggcacctgcctcataacccaggttgcagacacagcggtagctgccccgaaggttctcgcacacgccattggcacaaacctcaggatccagagcacactcgttgatgtctgcggcaggaggagggtgtgtcagcagcagcagaaggagggtgtgtccgaggcaggaggagggtgtgtcgcggcgcaccaggggtctctagaagtcagattccccaaggccatagctccagcccagacccggcctcattctgctctaaaccgaggtttctcagcctggacactgctgacatttggggccagatcattttttgctgtgaggggccatcccacgcattttaggatgtcgagcagctcccgtggcctccacccatgagatgtcagtagcacccaccgccccagtattactccagacattgtcaaatgacctcggtggggcaggggccaaattatctccagtttggaaatagtggagcagacatccatacagtggcactgtcataaaaataaaagcaattataggccagatatgatggctgtcacctataatcccaccactttgggaggctgaggtgggaggattgcttgagcccaggagtttgagaccagcctgggcaacatagcgagacccatgtctataaaaagcaatttttttttttttgagatagggtctcactctgtcgcacaggctggagtgcagtggtgcgatctcggctcactgcaacctccacctccctcgttcaagtgattctcatgactcagccccccaagtagctgggattacagccgcctgccaccacggctggctaatttttctatttttagtagagatggggtttcaccatgttggccaggctggtgtggaactcctgacctcaagtgatccacctccctcagcctcccaaagtgctggaattacaggcgtgagccaccgcatctggccataaagtaaatgttttaaaaattggctgggcatggcagctcgtgtctgtaatcacagcactttgggaggccaaggtgggtggatcacttgaggctagaagtttgagacaagcctgggcaacatggcaaaatctcatctctactaaaaaaaaaaaaatacaaaaattagccgggcatggagctgcatgcctgtaatcccagctatttgggaggctgaggcaggagaattgcttgaacccaggaggtggaggttgcagtgagccaagatcacgccactgcactccagcctgggtaacagagcaagactctgtcaaaaaaaaaagaaagaaagaaagaaaagaaagagaaagaaagagagagagagagagaaggaaagaaagaaagaatgaaagaaagaaagaaagaaagaaagaaagaaagaaagaaagaaagaaagaaagaaagaaaggaaaggaaaggaaaggaaaagaaaagaaaagaaaagaaaagaaaagaaaagaaaagaaaaggaagaaaaacaaatgagcaggtcatggtggtgagtgcctgtagtcccagctactcaggtggtatcacttgagcccaagaggtcgagtttgcagtgagccgtgattgcaccacatcactcgagcctgggcaatagagtgagatctcacctctaaaaaagggtggggggagttttggacacagacacgcatacagggagaacaccatgtgaagatggaggcagagatggggtgacgcctctatgagccaagaaatgccaaagattgctggagccaccaccagaagctggagagaggtccgggacagattctccctcaaagcctccaagggaaccagccctgcccgcaccttgatctccgacctctggcctgcaggagtgtgagagaatcagcttctgttgttgaagccgtctggtctggggcactttgttacgggaaccccgggccaactcctacagcctcccaccacagctctccccacatctggtaggggcaggctggctgctgtttggaggggctgggctccacttacctcgaccatccgtggtaatgccaagcccactgctgcacagtgcctggaactcagctggggatggagggacagagtgagacgggtcagggagcttagccatggctcggattcagccacaggcaaggatgaggccctctggtcttgggcaagagtttgggactaagacacaactccaaccccggggagggagcaactcccttcagcctctttttgggaagagcccccactccatggcagccatgaccccccaccagaagcgagaaccgatggaggcattcagaccaaggaggcgatggggaccgggcagccggatgctcaccggagtctttggcaggacaaagctggcagggctccccaaaaccgtggtccggattggcacagcagcactcggacttggtgacagtgccagggaaggggcgggcacaggagcccttctcgatggccccatagcaggtgctgcgcacgtgggtgtccacgcacacgcggccatccgtgcctaccgccagcccccccaggcactggcagcggaaggagccctcggtgttggtacagtggccgttcacgcagatgccgggcgtctggcactcgtcaatgtctgcagaagcagtggcggcacggggatgggttccagcgtgctcccttcctctctcccctccccatctcccaacatttccatcttcccagccattctatttctttcctttccagtttcttgtctttccagtttcctgttgtctgtgtctctgtcctctcctcctcttgtctccttcctcttctcctctcccattattccccatctttctatctttctctccacctttaaacaaattttttaaacgcagggtctgacttccagactggagtgcagtggcgtgatcatagctcactgcggcctccaactccagggctcaagtgatcctgctgcctcagcctcccgagtaggagggactacaggggttcatctccatgttcggctaatttttaaaaattttttatagagacggagtctcatcatgttgcccaggctggtctcaaactcctgagctcaagtgatccttctgcctcagccttccaaagtgctgggattacaggtgcatgctaccatgcccagctaattttttttttaggtagaaatggcgtctgactatgttgctcaggctggtctcgaactcctgtcctcaagtgatcctctaacctcagcctcccaaagtgctgggatcacagatgaacctggcccctccccaccttataatgcatcactttttttttcttctgagacggagtctcactcttgtcacccaggctggagtgcaatggcgcgatctcggctcactgcaacctctacctcccaggatcaagtaattctcctgcctcagcctcccaagtagctgggattacaggtgcccaccaccatacctggctaatttttgtatttttagtagagatggggtttcaccattttggccaggctggtcttgaactcctgacctcaaatgatccatctgcctcggcctcccaaggtgctgggactacaggcgtgagccacggcacctgcctcttcttttcttccttttcttcttcttcgcttctccccttttccctcctcctcctctttttctccctgccccttctcttctccttctctcatgctcgtcccatccccgtccggtccctctcctcttcctcgccgtccctctgcttccccatctcccttctcccctccgctggccagtctggctccaggctcacccatgcagtagtggccgccaggcgccagcaggaagccgggtttgcagaggcaggagaagctgccatcctcgttgagacacacgccgttgacgcacatggtgctggtggcacactcgttgtggtctggggacaacagcagaggctgggtccaggcagggaccacactgggaccctctctctccctcctccaggctccagggctgaccccccaggatccctccctggagtgtgggaggcaaacaagctgtggttgtctgtgactgtgtgagcttgtatattagtccgtccgctgggacgttgagttccccggggcacgacccctgtcttactcaggctgcaatacagtaggtgctgcataaataattgctcaaagctgaataaacgtggtggtttttgcacaacattggaaatttattaaatatcagtgaattgttcattttaaaatgtttaaatattttttaaaagacaacaatttttttttttttgagacagagtctcgctctgtcgcccaggctggagcacagtggtgtgatctcagctccctgcaacctccgcctcgcgggttcaagcgattctcctgcttcagcctcctgagtagctgggattacaggcatgtaccaccacgcccggctaattgtttttgtatttttagtagagacggggtttcaccatgttggccaggctagtcttgaactcctgacctcgtgataagcccgcctcgtcctcccaaagtgctgggattacaggcgtgagccaccgcgcccaacctcttgttcacttttaaatgattaaatttaggttgtgtgaatcttacttcaatttcataaaaaggaaatggaaataaagttagtaagaccatggtctaatttaatggaaggtggcaggggcagaaatgagttgttttccaaaatgtcagttttaaacaataaaggactgaacatacatttaaaaaaaaaaatgtggctgggtgcggtggttcacgcccgtaatcccagcactttgggaggccgagatgggcagatcacgaggtcaggagatcgagaccatcctggctaacatggtgaaaccccatctctactaaaaatacaaaaaaaaaaagaaaaaaaaaatcagccgggcgtggtggtgggtgcctgtggtcccagttactcgggaggctgaggcaggggaatgatgtgaacccgggaggtggaggttgcagtgagccaggatcacgccactgcactccagcctgggtgacagagtgagactccatctcaaaataaataaataaataaaataaataaatgcatgaaatgccaccacaaaaatatgcacatgagcattcacagaagcattatgcctaacagcaaaaagtgaaaacgaaccagtgtcctactgaatggatcgacacactgtggtctattcatgtaatggaacattattcggccatgaaaaagaatgaagaagccaggtatgctggctcatgcctgtagtcccagctactcaagtggctgaggcggggacattgcttgagccccccagggcccctccctggggtgtgggaggcaaagaagctgtggttgtctgtggctgtgtttgcttgcatattagtctgtctgctgggatatgagttaaagtccagcctaggcaacacagtgagacccaatcacaaaaaaataaatacatggccgggcgcaatggctcacgcctgtaatctcagcactttgggaggccaaggcgggcggatcacctgaggtcaggagttcgagaccagcctggccaacatggtgaaaccccatctctactaaaaatacaaacgttagccgggcacagtggcgcacacctgtaatcccagctactcaggaggctgaggcaggagaatcacttgaacccgggcagcagaggttgcagtgagccaagatggcaccactgcactccagcctgggagatagagactcaaaatgaataaatgaataaatatataaataaatataaatatatatattttacatatatatatatatattttttgaaacaaggtctaggtctgtcacctaggctagagtgcagtgatgcaatcacagctcactgcagccccgaactcctgggctcaagtgatcctcctgcctcagcctcctgagtagctgggactacaggcacctgccaccatgccaggctaatttttgggttttctgtagagacagggtcttgctgtgttgctcaggctgatcttgaactcctggcctcaagcgatcctcctgccttccaaagtactgggattacagttgtgagccaccaagcttggcataaaaaaaaatttttttttttttgagactgagtctctctctgtcacccacactggagagcagtggtgtgatcttggctcattgcagcctccgtctcctgggttcaggcaattctcctgcctcagcctcccgagtagctgggattacaggtgtctgccaccacgcccagctaatttttttgtatttagtagagatggggtttcaccgtgttggtcaggctggtctcgaactcctgacctcggcctcccaaagtgctgggattacaggcgtgatccactacactcggacttctttttttttttaggagatggagtctcgctctatcagccaggctggagtgcaggggcacgatcacagctcactgcagcctcaaccttttcagctcaagagattctcctgcctcagccccgcaaagtgctgggattacaggcataaggcaccaagactggctccaaaaggtccttttttgtgattcacggaataaattcaggaaggaggaaatgaaggggagagtcagggtggtcaggggataagaagagtctcaggtgggctgctgggttcagaggtgagcagaggagacgtcgtagggagggaggtgggtttgggggcacagtgaagatttgaggtggctgtaaaaggcagctagtggggcccggaagcccctgcccacccgcccacccccaactcacccacacagttcttgccgtcagggctgagctcgaagcctgcattgcagacacactggaagctgccctctgtgttgacacagcggcccaggtgacaaaggccaccactgacaatgcactcgtccacatctgcggggaaggcaggcgggcagtcaagaggtgctccccaccctccaagcctgggccagaacccccaacaacatcacccctactcttggatggacagccgtacccacgcatgcctgcctggtgggcgtggcctggaagcccgggtagcaccggcagtggtaggtgccggggatgttgacgcagtcaccgtggtggcaggggctgctggtgcattcgtctacatctgaggggagaggaccctgagccctagcacgagcagggcagtgagaaccgcccccccttccacctggccgcggctcaccaatgcactcgccgcgcacgtcctgggtgtagcccacgttacactcgcagcggtagctggaaggcgtgggcaggcagcggccattcagacacaggttggtgaagtgtcggcagatgtcaatggtctggttcagggtagcagtgcctacgggtggggccggcagaggcatctgagcagtggctggccccgccccagtctggagcctgggcttcacctctctaggcccagataccccctctaaggctgggaccctgccctggctcagatcctgccctctttctcatggagagtcctgccttagattcagaactccaacctgggatctagatccctccaacctgggacctagatccctccaacctgggcctggatccctccaacctggggcctggatccctccaacctgggcctggatccctccaacctggggtctagatacctccaacctggggcctggatccctccaacctgggacctggatccctccaacctgggcctggatccctccaacctggggcctggatccctccaacctgggcctggatccctccaacctggggtctagatacctccaacctggggcctggatccctccaacctggggcctggatccctccaacctgaagcctagatccctccaaactggcacctcgatcccttcaacctgggacctggatccctccaacctggggcctagatctctccaacctggtgcctagatccctccaacctggaacccagattcctccaacctggtgcctagatccctccaacctggaacccagattcctccaacctggggtctagatccctccaacctggggcctagatatctccaacctggggcttagatcccaccaacctgaagcctagatccctccaacctgggacctggatccctccaacctgggccctagatccctccaacctggggccttagatccctccaacctggggccttagatccctccaacctggagcctagatccctccaacctggagcctagatccctccaacctggggcctagatccctccaaaatggagccttagatcccttcaatctggagcctagatccctctaacctggtcccagagatgcccagactcccactctgggcccaaatcctcattatggggcaagaacccaccccaggcctaaatcctacatgacagacccccacaccaggcccaaactccccacccaaagcccgaactctgacttatttatttatttatttatttatttatttatttttagagacagggtctcactctgtcacccaggttggagggcagtgacacaatcacagctcactgcagcttccaactcctgggctccagcaatcctcctgcctcttcctcctgagtggcagggactactggtgggcatcaccacacctagctaattttcaatttgctgtagagacagggtcttgctatgtcacccaggctggtctcgaactcctggcctcaagtgatccttccacctcggcctcccaaagtactgggattataggcatgagtcgctgtgtccagcccaaaacctaactctgaggaccagattctccagttacctccatccccatccactactagcactgtcatccctactagccaggccaggagttccccctccaaagccctaaccctctctctgaggcctggacaccgtcccctgtttggagctctctccccagatccaggaccatccttcaagtcttggaatgttcctcccaagccccaggcctcaccaatattagagttgccagggcccaggctggggatcccacgcgcatcagagccatgggggttgagtcgcgctggcccaagagggggacccatgccattggatccgaagcccaggaggccagggaagaggccagggtggccgggtagcagcggcagccgctgggcgcacagttgctggaattcatctgcaaggaagcagggttgaggccaggcccttggccctcccctgtcccctcctcacccacagccctgcaggctgcagctcttactcactggagccccgaggaggacacagctcagggaccgggccagctgcccagcacctgcccctgtcacagcagcactgcctgcgagtgtagtggccggcgaggtctccagcacagcggcccccgaaaagcactgagaagcaggcgccggcccggtagtctgcaaaagatcagagggtgagcccatgagcacaggacatcagtgaccagacctggatccaaattccagctgtagcagcactgcctgtaggacgggtctgtttgccgctctgtgcctcagtttcctctccataaaatggggatgcttggagcatccacctcacccgggaaaagtattacctggatgaaaagtctgacatagtccagatgcagtagctcacacctgtaatcccagcactttgggaggctggggcgggaggatctcttaaggtcaggagtgcaagaccagcctgaccaacatggcgaaacctcatgtctactaaaaatacaaaaattagccaagggtggtggcaggcacttgtaatcacagctacttgggaggctgaggcaggagaatcactaattgcttgaacccaggagacaaagattgcagtgagctgagatcatgccactgcactccggcctgggcaacagagcgagactccgtctcaaaaaaaataaagggccgggcgcagtggctcacgcctgtaatctcagcactttgggaggctgaggcgggtagatcatgaggtcaggagttcaagaagagcctggccaacatgacgaaacccagtctctactaaaaatacaaaaattagccgggtgcggtggcgcacacctgtaatcccagctacttgggaggctgaggcaggagaatcacttcaacctgggaggcagaggttgtagtgagccaagattgtgccactgcactccagcctgggccacagaccaagattccgcctcaaaaataaataaataaataaatagaaaagtttgacatatggccaatgctcgctcagtgccatctcttgttaccaagattccaagttatcgcacagaggtagtgagctccccgtcgctgcaggcatccaaccacactaaggaagacccattggcggggaaggactaccccagtgggataccaggcagggacacggagatctgcagctgtgtgtctttgcttgctggcttcaggcattatgcagaagcctacgagactgtgaatttcagagaggggccccaaggagtcgaggggtggattgacggctacagcccccggggtgactgaggcagacaggctccccaggtatgagaaccaccaacactcttccacttcccactgcgccctcaaggtcaatggctttatgcagcgatcagatttctcaggctctggcttaaagagcatatttttaggcttaaaaatgcacaaaccttggctggtggcccacagtttaaaaaactcctcccagcagctgggagggccactgagagccacccctgacctgccccgagctgggaaaacatgcaaatgtttctacctccctggtcccctccccttgcacctgggggccccccaggtacgtgcgtgggagtcagggtttttcgttctcagccttatcatagcccctcaaaggggactgggcctgcccagacgaggagagatcaacagactcctccaaagtcacacagctgcaaaagcaagaggaggacgggaaactcgatttcccaatctcaggggacccaacaggcaacagtccctcaagcaagagagacagaatataagaatttcaacaaaaatgctcagccacagtggctcatgcctgtaatcccagcactttgggaggctgaggcgggtggatcacctgaggtcaagagtttgagaccagcctggccaacacagtgaaaccccgtctctactaaaaatgcaaaaattagccgggcatggtggtgggtgcctgtaatcccagctactggggaggctgaggcaggagaatcacttgaaccccggaggcggaggttgcagtgagccgagatcgtgccattgcactccagcctgggggacagagtaagaatgtgttaaaagaattttaacaaaaatgatcctgtcattgctgtaagtacatactgtgagctaagtggccacagccccaacattacctggtgtccatgaatgtgtattaagtatcctctaggtaccagccctctgcaaattactccccaaatgatatcttactcaatcttcattgagctaggtactgctattatctaccattttacagatggggaaactgaggcacagagcggttaagtcacttgcccaaggccacagggtctgtgagcagctctgggtgggagccccagactgattccaaagcctatgttcagaggctggtttgtccaatccaaggactggtctttagcagctgagagaggaccccccgcagtccaggggatgtatccacagctacccccaatgccagctgtgatggcccccagtggtggagacctagaaagtctggagttggccagccgggcgcggtggctcacgcctgtaatcccagcactttgggaggccgaggcgggcggatcacgaggtcaggagatcgagaccatcctggctaacacggtgaaaccccgtctctactaaaaaaatacaaaaaaattatccgggcgtggtagcgggcgcctgtagtcccagctactcgggaggctgaggcaggggaatggcgtgaacccaggaggcggagcttgcagtgagccgagatcgcgccactgcactccagcctgggcgacagagcgagactccgtctcaaaaaaaaaaaaaaaaaaaaaaattagctaggcgtggtggcgtgcgcctgtactcccagctacttgggaggctgaggcaggaggatctcttgaactgggaggcagaggttgcagtgagctgagatcacaccactgcactccagcctgggtaacagagtgagactctgtctcaaaaaaaaaaaaaaaaaaaagagagagacagacagctgaacaaggggtctctctcctacccactctctcccgctccagcccctcggttcactcaggcagtgggtgccatccaggctgctggcaaaaccttgggaacaggtgcacacgtagctcccgacagtgttggtgcagtcacccccagaacagaggccggacaggctgagacactcattcacatctacataaacagggacaaggtcagaactgggcacctcaccagcctgacccctctgccttcctgcaggggagcctgagccccccaggtcatgagtcacagaggaggtctcaggttgtccccctccagtcacccaccttcacatgcggcgctgctgtcactgagccggtgtccaactggacagcggcaatggaaggagcccaccatgttgacgcagctgcctccctggcacaggcctggcacagcctggcactcatccacatctgcaaggacaaagcccggcaggggagtgagaggcccatcggagggaagaaccaaggcagctaaggcctcccactcagccctgaccccactattcaccttggcaggcccccgtgtggatattggggatgaagccgcggcggcaggggtgtggctgtgcagggcaaagttcacatggaaggccccaggcacggcccacagtggcacagcaaagtgccttggtgcacacgaggcccgtcagctgatgctggcacccctcggggcctacttggccaaagcagggtcccgtccggtaatctgcagggcagacagatgtgggtacctggctgagggctgcccctgtctggagatctctgcgtctctaacaccttctcagcggcccctgcacccacagaccaggctttacttatgctgctcccttactaaatagaatatctttcctcccctttccctacctaacgaactcctattcacccttcaaaaccctttttcttcaaagcatttcctgaccaacttccaagagaccagcacctccaagccaataaagctcagggcctgtgtgaacaccctgtctgaactgatgggactccttccccaggcctatcctcccttcaggcctgggcagggacccacggatgcccagctaaaaagcatgtctagtccttgagcacacgcctggccctgccatatcgcccagatttggggaaggatctgttatctgcctaaattctctggacccccaacatcacatccccaatccccatcaggcccagcccaaggtgaccgcattggttcccccaaccccagtacatgagcccagatgtgacttcttggctctcttctcccagatgtttccaataaaggagttagctctcaaacaagggcagccgctcccaagagaagaagccaaactcacccccaactcaggccccgtaaggaggaggggcttcacagagacccccaccccccagctgtcctgatgccccaagccaaaacgtaattcctggcagctcccccactccccctccccctcactcttctgccacccagagcttggcccgcctccaacaagcccatgttctaattctgcagtttccagaagcccaccctcaaacccaggtcacttccccagcccctccagcttctagtccccgggtcgtgcccatcctcaccttcctgggctgaaacaccacattaggcacccagatgcctctgcatctgaaaatctcacaagcctggatgtccctgacgccacccactccggttctctttctctttctcagcctcctgtgggctcggttttttctgtccaggcttaaatgcccaggtggctgtctctgctggcccttccttctctcacggggatcctcagcggcaccctgggcttcagtccccatggatggggcagcccacgccgccatctcagccccaggcctgagtgtccagctgcttcccagacaacttgcaagtccctcggccaacactgagctcagagtcctcctcctccctgccagggtgcgccactaccttccctccagttttcaccaggtcttgggttcatcctgactccctccttcttctctccccgtccctgccacacctcactgctcacaagaaagacatcactgtgtccgttctccttttttcttttcttttctttttttttttttttttgagacagggtttcgctctgtcttccaggctggagtacagtggtgcgatcttggctcactgcctcccaggttcaaaaaattctcatgcctcagccttccaagtagctgggactacaggcacgcgctaccacacccagttacatttttttgtgtatttttagtagagatggcttttgccatgttggccatggctggtctcaaactcctggcctcgagtgatctgcccgcctcggcctcccaaaatgctagaattgcaggcatgagccacagtgcctggcctcttttctttctttctttctttctttcttttttttttttaagagacagagggtctggttctgtcacccaggctggaatgcagtggcaccaccacggctcactgcagccttgaactcctgggctcatgcaatcctcccacttcagcctgagactacagatatgcaccaccatgccaggctaattttttactttttttagagagggggggtgtctcactatgctacccaggttgatctcaaactcctggtacatccaccctcttaattttggtaacaacctctcagcaggtgaccccacctatcttagccgtcttaaaaatgggatcatttttaagagttagggtgactgggtgtggtggctcattttgggaggctgagacaggcagatcacttgaggccaggagttcgaggccagcctggccaacatggcaaaacctcatctctactaaaattacaaaaattagctgagcgtggggatgcctgtaatcccagctactcgggaggctgaagcgggaggattggttgaacctgggaggcagaggttgcagtgagccgagatcatatcactgcactctagcccgaaagagcaaaactttgtctcaaaaaaaaaagagagaattagggtgcaataaagagggggtttgcccatctcatgaagtccagtccaccctaccagatccagctgaggggtcccctcctccaggaagccctccctgactcccttccatggagcagatggtttctctgtccttcacatgctccagggctgccccaacccttgtcttagccttgacacccccagataagaatcttctgcttgcagtttcttctccctgcccctcagactggcacatcctctctctttcctaccagactccaacacaggtgctcgctcagagccagtgaatagcagatgttttggagaacagatgagcaaatgaaagaaatgtcctcagactgccccaaatgcgggaaggaggccagctggttcctttcaaggcctggccatgtctcagggacttccaggaaaccccctttcctccatcgagtcccctgtctacctcccacccgcgcatgcttggtacctctctcacattgaggtcccatgaagccatacacacaggcgcagcggttgggcccaatgcagcgacccccattgtggcagccgcggtcacagatggctgtggaggagagagggtgatggctggaggtcccccagcagcagagagagctggggttcacagcaagcctgtcttcacccaggaatccccaggatctggcccaggttgaataagactgaggctgagctgagtggctagcgcctgtaatccgagcgctttgggaggccaaggcaggtggatcacctgaggtcaggggttcgagaccagcctgtccaatatagtgaaaccccatctttactaaaaatacaaaaattagccaggcatggtggccggctcttttaatcccagctactcaggaggctgacacagaagaattgttcaaacctgggaggcggaggttgcagtgagctgagatggtgccactgcattccagcctgggcaacagagcaaaactccatctcaaaaaaaaaaaaaaaaaaaaaaaagggccgggcacggtagctcacgcctgtaatcccagcactttgggaggctgaggcgggcggatcacgaggtcaggagatcaagaccatcctggctaacacagtgaaaccccatctctactaaaaatacaaaaaaattagtcaggcaaggtggcgggcacctgtagtcccagctactcgggaggctgaggcaggagaatggcgtgaacctgggaggcggagcttgcagtaagccgagatcttgccactgcactccagcctgagtgacacagcgagactctgtctcaaaaaaaaaaaaaaaaaaaagagactgtggcaataaacgtcccctgcaatctccagtccaggaagaaggaaccctgggcagtgggcaggtggcagcagagactaatactctgggatcacagtcccaggtgtgcaaagaggggagtcccatggggatactcacgctgcccacacacggtgcctgtgtagcccttctgacacagacaggacgccccccggcaggtgcccccattcatacagctcacactgcaccctgaccctggggacaggaaggcaggacgcatagtaatgtggagatgggccccgagatgccctcctaggaaggctgcaggactaggcatgctcagccccgctcctgtccttcaacaaaagcagcccaggctcctcgtggcaaccagaaccctgtgaacttcttctccctcccgcaagaggccgcttcccgctcacctcggctcaccccgcagctgggagccagcgtcccatccgcacaggtgcacaggttgggctgggagcagaagccttcaccgcaggcgcgcctacagatggctggatgagtgcagcgggtggcagtcaagaccaggaccgagcctgggccgtccctgctccattggtgtccgggctggccggaacacctcagtggacgctgctggtcatctgcatccccggctctgctcatagcacaccccacccctgttttcatgggatgtccccccactctcgggctgggctgggcagggtgtgtgacccaggctgtgggttggggactctgctagagccatggggagagaatgctctttgggccagagctgctgagctgtgaggacagagctggaggtgctggggtcctggatactgaggttgggtgtctcctgggaagtggagtcagattccagagacagaaacagaaagagagggtgaggccagagagagacaaacagagagagactcagagaaacagagagagagagaatcagttagatagagagacagtaaccaacagagagaggccaggtgcagtggctcacacctggaatcctagcactttgggaggctgagatgggaaaatcgcttgaggccagagtttgagaccagcctgagcaacacagagacccccatctctaaaaataataataataaagaaaagaaaccaacagagagagacatgagcagagatgaatagagagaggcagagacaaagcaagggaaccagagagacagacagacacaaggaggttgtagggcaaaggaaatgaacatggcaggttggcctggaaccctgaggacagacgcagatgcaagggccattcctgtggttcagccagaggtccctggctaagtccccgtgtaaacagagctgaacctgcaggcaggtaagagtgtccccggcctgtgcccccccacctccagacggcggtagcactcacgtacgacacactggctcctgccagggaatgtcctccagcctggacagcagtaggcatggaaccgggagccgcacacattcggccttcggggacagcgagatgggtctggtgagcccctgcccgtgtggacatccccccgggtattccgctggccccaggacagcccaatccacaccgaaggggtctcccagcatcccaggtaccacgcacccctgcaagatgcctgggctgccccgcctccgcacacgtccaggacctgcagcctccaaggccccgtcccagcggccttggccacctgccatgcacaacagggccgaccaggccagcaggagccgggccagggggccccttgccaaatacagaccctccagagtcatggcgtgtcccctggaggctgcggagaggaagcagagtcagccctagatgagccccccaccctagccatgggggacccaacacaacgaggagggcagggtggttgccaaatggggcagccccggggcctctgggagcccaaggaggcatccagccccaaccgggaagcggtgaacagtcagaggaggcttcctggaggaggtgtgatgttagagaagggtcttggggctgagggtgcacagccaaggcaagacgggagtgggaagtggaagggaggggagagagggccaggtggggccaggtggggccaggcgttgcaggagtgggcatagcagtgtcatgcagcttttgctcattcgtcaaggacaatgaagagcccttgaaaagctttgagtgggaggagcaaggtcagaaatgcatgttaggtggtgtggggaagggcagcagggtcccgggggggaaacagggtgtcagaaggctgggggctgtccagatgggagagagaggagaggaatgggaggctcatgtcgtgggaggtggagggcattgaggagattcccaaagttctagctgggacggtggagcccagagagcgtccagggtaggaggaagatggtaagtcgtggaaggcaacaaccccactgtccctctgtgacacagatacccccactcctgcaatgcctggccccacctggccctgtgtcccctcgcctccacatcccacgccggtcttgcctgggctgtgcacccttagccgcaagacccttttctaacatcacacctcctccaggaagcctcctctgactgttcactgctcccaggtcagggctggatgcctccctgggcagggggcccaggcaggggctggaacttcccaatgcagagagtaaccctgtgcccagcagggaagggaccgcttctgtgcccatttcacagatgcacaaactaaggccatcacaccatgagtgaggggctaagccggagcttaagcccacgaagagaagaaggaggggaagaagatcaggaacggaactcgctcctgccccccttggctgggtctttcctgggccatgaaggacgggagggagaagaccgggacaggagacgaccgtttggagggtggaggcaaaatacttgagggagagaagccagaccaagtggccttcctgttccattcaggttccagggaggaaaggaaccggccctaggtggagaatgggcggggagccctgctgtgtggtcttggccacgcccctctctgggccaacctggttgtccaaaggccccggagaagggagagacccctgtcaacgttggagggttggctggctggagaggggcgccctctttttcttctcagttgtccgggtcagtccgcactctgaggctccgtggactccaagcagcctcggggcttgcaagccctcctcccccactccctccgccccagccccctgcctcgggtcgggtgggggaattaggtggggggagtctctggcctgatttgcctcggtcccccctacacaccgctgcttctgcgagccacaccctggagtttgtggaatgaatgagcagagaaggcgcgcccggcacggggtgtggaggctgagggccaaacagcgagggataccaagcttcgccgacggggagggggcgcccccggagcccgcggggcgcgatctccacccggcagggcccccggccgcgaccacgcttggctccgccctcacctgtggggtcaggggccccgcgccccggccgagcccctcccgccgggtccccgcgcccccactccccactgcggcgggcgccactagaaggcggagaggggagggggctgggcccggggctgcccggctgcgaacaaaggaatcctctccccctccccctgccggcccccccgcccccgccttctccacccttcagcgcccgcgatctcgccccgccgctggccccgcgccttcacctacctgcgaggcggcgcgcgtggaggcgggcacggcaggcggacgcgcgggactcagcgctgcagggcgggctcctgcggcgccggggacccggggcgggaacgcaaagccgagaggccgaccccgccgcgttcccagcccagagctgccactcgggggggagttgggggcgggaggagttggaggagggcgcgtttgcacctcttagctcccggggcggggacggggggctccgatccggggcggggagagaggctgcggctcgggggagggtccggggctccgagtgaaaaactccgatggactggagggatgtgagggcgggctgggggcgcctagtaggggctgccggggccgcgttttcggatcgagactaaggtggaggtggggctctgacttttggagggcctggacgacagcctgggcagagaagtcccgggactcacctgggcggccctctcagggcctcccaagccgccaccccctccctcgagcaaggagaattgcgagagtgacgttggaaactcacctggctcttggagcctggattcttaactaggctgagatcaggggcccctaaatatgttgacaaaacattgggcaaagctgtatttcccagggagaagggcccaggtttttcatctggttctcaaaatgaagaggttaacaattcaaacggtgtaaactttcaaatctctttgaacctgtttgtccacctaccaaagggaccagacaagaattttggctccctatctgttgtcagtactccaaacaaaaatttctaggcttttccactaccttcatacctttgagaatagacccttaacatggggatctgtcagaagctgtgcgttgggcctgaagctgttactccatccagcaaactcctacgcatctgtcaaagtccagttcaaaaattccctccctatccgcaaattgtgagtttactctattgaactcccaaagctgattgtgctgaatatccccccaccacagtacttccggaatctaataaataagtaagcccagtgggcttgaaaccaggagttcgagactaacctgggtaacatagtgagaccccatctctaaaaaaaaaaaaaaaaaaaaaattaaaaagaattagccaggcctggtggcatgcatctatagtcccagctactcaggaggctgaggcaggaggactgcttcagcctaggaggttgaggctgcagtgagttatgattgtgccactgcactccagcctgggcaactgagcaagaccctatctccaaaaattggagaccctgtctccattccggaagtgctatggtgggagtatattcagcaagtcagctttgggagttcaatagggtaaactcacaatttgcagggagggagaggattttgtttatgttttgttttgtttgttttttgagacaaagtcttgccctgtcacccaggctggagtgcaatggcacgatcttggctcactacaacctccacctcccaggttcaagcaattctcctgcttcagccttccgagtagctgggattacgggcttgtgccatcatgcccggtaaattttttgtatctttagtagagacggggattcaccatgttggccaggctggtctcgaactcctaacatcgtgatccacctgcctcggcctcccaaagtgctgagattacaggcgtgagccaccgagtctggcccagaaggggatttttgaagtaggttttgacagttgcataggagtttgctggaggaaacagaacaggcaaaggcctggagaaggagagaacttagaacaaacatgcctggatggagtgaggttggaactttaggagagaggagaaggggagggagcaagaggaaagcaggaaacataagaagaggctagaagcaccgaggagccctcagcaggctccccccccacctctgaggggagacacggtggactcacagaaaggggaggttctcccaaggctccacttccaggtcttagactgtgtccggggagcattgagggccccagggctgggctcggggagcatgggacagacgccgacttcagggacaagatccagtcatcctggccaagggaggggcccgtggaccctgtgagaagggtcaggtggggtgctggggcatggggagggtggactggggagggaaccccaggatggaggtggcccagcagagacaggggggtggggttcctgttggagggtgggcccaggggctattgtggacaaaccagtttccccggccaccttggacacctctttccaggctcctctgccaaggtccacccagatttgttctgcaacaaatgaatcttacatgggcacggggacaagcaccgggtgccctagaagcagcccagcataggtgcaaaaggtggggagagattgtcccatcccagggacactgcacagccactgttgccatggctaagtctggaggagggctttcctggaagaactgtgggccagggagcgactcagtcctagaagtctccctacctgccctccagaagagaggggagaaggaagccggagggtgtggcaagaccaggatgtggagctgttggaagtcaccgcaactgaagtgctcgaaaacggcagatagtgggcattggttgttcacagcccccaacccaagctactgtccacaccgcgtgctgtagtttcagacttcccatggtgccaccctggtctgttatgttattgccagttattgatgtggtatcacagacagtgtcaccccccactgtacccttattacatcacactgttaagaagggacatttaggctgggcatggtggctcacgcctgtaatcccaacgctttgggaggccgagttgggcatatcacgaggtcaggagatcaagaccatcctggctaacacagtgaaaccccatctctactaaaaatataaaaaattgctgggcgcggtgggtcacacctgtaatcccagcactttgggaggctgaggcgggcggatcacgagctcaggagatcaaaaccatcctggctaacatggtgaaaccccgtctctactaaaaatacaaaaaattagctgggcatggtggtgggcgcctgcagttccagctactcgggaggctgaggcaggagaatggtgtgaacccgggaggcagagcttgcagtgagccgagatggtgccactgcactccagtatgggcgacagagcgagactccatctcaaaaaaaaaataaataaaataaaaataaataaaaaaattagccaggcacgggggcacacacctgtagttccaggtacttgggaggctgaggcaggagaatcgcttgaacctgggaggcagaggctgcaatgagccaagatcacgccactgcgctctagcctaggcgacagagcgagactccatctcaaaaaaaaaaaaagaagggacatttaggctttaaatcctaccgcatatcacagtccccccacccaggactgtacaaaacacatgcatggtctctccgtcaaaactgcatcatcagccaggcgctgtgcctcacgcctgtaatgtcaacactttgggaagccaaggtggaggatcctttgaggccaagagttcaaggcaagcctgggcaacatagcaagaccccatctctacaaaaaaatagaaaaattagctgggcatggtggcatgtacctgtagtcccagctacttgggaggctgaggtgggaggagtgcttgaacccaggagtttgaggctgcagtgagctatgatgttgccactggactccagcctggataacagatcatgaacctgtctctaaatatgtatgtatatcatcatcatcaccatgttcctattctacagtcacttgtccctatgaccctgtctcattgtcacctgtccatgtgacaccctgctcttttctggttgctccgctacctgggacatgcatgtctcctgtcacctttacaccttcacctttctgctgtgacacagtccccggctcatggtcataccattacccagaatgtcagggttcttaacatcacaattcactggcatcagcaacaaccgggctcagcagaaagagtgaccaagcgtggtggtgccgcagccaaccacattcacacacatcacatgcagatcgggccccaggaagacaccattcattaccatctggcaccctaagccctgatgctgctcagtgatccgagatgctggcaccagttccccccaccctcagtaaaatgaggtccatgggggctccaatggggatctggtgttttaaagtttttgtttttgtttttttgacagaatcttgctctgtcgcccaggctggagtgcagtggtgcaatctcagctcactgcaaccgcctcccaggttcaagccattctcctgcctcagcctcccaagtagctgggactacaggcacacatcaccatctagttttttttttttctttttctttttcctttttttttttttttttttttttttagatggagtcttgctctgtctcccaggctggagtgcagtggtgccatctcggctcactgcaacctccacctcccagtttaagtgattctcctgttttagcctcctgagtagctgggattacaggtgcctgccaccacgtctggctaattttgtatttttagtagagatggggtttcaccacattggccagtctggtcttgaactccagacctcaggtgatccacctgcctcggtcccaaactgtggggattacaagtgtgagccaccgcgcctgacccctagtggatgttctctttttttggtttttgtcctccccggaccgcccccgccccgagatgcagtcttgctctgtcacccaggctggagtgcagtggtgggatcttggctcactgcaacctcctcctcctgggttcaaggaattctcctgcctcagcctcctaagtagctgggattacaggcgtgtgccaccacacccggctatttttttttttttttttttgtatttttagtagagatggggtttcaccatgttggtcaggctggtctcgaattcctgacctcatgatatgtccgccttggcctcccaaagtgctgggattacaggtgtgagccactgcacctggcccctagtgggttttaaaattacagtgtcacctgttgctgtcacctgttgccttcccatcattcccagttcctgtgacgttgtcacctgttgctgtcacattgtcacactattaatgtcccccagaactgtccccccccgctgctgccactgtcatcccgttaaggtcactgtgagtcacgccagccccaccctccgtttgactttctgagcagccatggagccccccctcataggcgggacttgactgtgtgcacccagagccagcagaccccagatgttcattagcatgagctcgaggaaggcatggagacaggagtgggcagggtgtgcccaggagcacagggtcaaggctggggacaaggagatgggaggagggacggggagatgcctgcagtctatggtgtgtggagtgcgctgggccagcctaggccagggtggcttggggacagagccctctttgtataagcacaggaagcagctgggagtcaaagcattgcatacaacgccaggagtttggccacgtgcccaggaatgaggcttggagcggggagggaagccgcagaggacccaggaaagctctgaggaagagatcaagctggatcctcacaagagaccctgaagacaggctctgatatcatcccattacacagatgaggaaactgaggcacagagccaccacatcgcccactgggaccccaccaccaggaaagaatacaggcaaatctgaacccaggccacaaagctggaaccttccccgtggccttgggcccccagccacaccctcaccccattgccttgatgttctagctgggggacctgtctagggtccatatacaatatattatttctctttctaataaacacacatgtttgcacctttatacattgttctgtatttgccctatttcctctttgtaaaaataattaaaaacaaacaaacaaacaaaaaaacagggtctccctctgtcacccaggctaaagtgcagtggggaagataacagctcactgcagcctcgaattgggcttaagcaatcctcccacctcagcctccagagtagctaggactacaggcacatactacctgtctaatttaaaaaaatttttttttttagagatagagtctcactatgttgcccaggctggtctcgaactctgggatcaagtgatcctcccaactcatcctcccaaagtgctgagattacaggcatgagccgtcacacctggcctctttctctttctttctttctttctttctttctttctttctttttttttctttttttgttcagacagagtctcgctctgtcgcccaggctggagtgcagtggtacactctcagctcactgcaacctccacctcccaagtttaagcgattctcctgcctcagcctcctgagtagctgggagtacaggcgcccaccccacaccctaatttttgtagttttagtagagacggggtttcaccatattggccaggctggtctcgaactcctgaccatgtgatctgcccgcctccgcctcccaaagtgctgggattacaggcgtgagccacggtgcctggcctctttctctttctaataaacacaaatgttagcacctttgtatcttgttctgtatttgctttttctcatctttgtaaaaaaaatatatttttttcttgcaaactaaatcaatccctctcaattaccatcttctttttactgttttcttttactgagatcaatttcacacaacatagcacttactatgttcaagtgtacaattcagtagcgttcagtacacgcagtatgtgcagccaccccctctatctagttccaaaacgtactcatcaccccagaatgaaatcctgtccccattagcagttgctccccattccccataccccagtccctggcaaacactaatccactttctattctctgtggatttgcctgttccggacattgcacgtatttattttattttattttattttattttattttattttattttattttgagatgaagtctccctctgtcacccaggctggagtgcggtagtatgatcttggcttactgcaacctccacctcccaggttcgaatgtttccctgcctcagccttccgagtagcagggattacaggtgcacacggcaccgcgtctggctattttttttttttttggtatttttagtagaaacgggatttcatcatgttagccaggctggtcttgaactcttggcctcaagtgatccatctgccttgacctcccaaagtgctgggattacaggcatgagccaccgtgcctggcctagacgtttcacgtaaatggaatcacacactaggtggccctttattttattttacttttttttttttttttttttgtgacagagtttctctctgtcacccaggctgcagtgcagtggcgcgatctcggctcactgcaacttccgcctcccctgttcaagcagttcccctgcctcagcctcccaagtagctgggactacaggcacacgccaccacacctggcaattttttttttttttttttgtattttaatagagacggggtttcaccatgttggccaagatggtctctatctcctgacctcatgatctgcctgcctcggtctccgaaagtggtgggatcacaggcgtgagccaccacgcccagcctcttttaacttcttattacatcttggcaatatttccatgtcgagccgggagcgggggatcacacctgtaatcccagcactttgggaggccaaggcaggcagatcccttgagtgcaagagttagagaccagctggggcaacatggcaagctccgtctctacaaacaacacaaagattagccaggcctggtggcatgagtctgtagtcccagctactcaggagactgagatgagatcacttgagccccagatgtctgggagccccagatgtcactgtagaggctacagtgatccgagatcacatcactgcactccggactgggagacagagcaagaccctttcaaataaaaagaaagacagagagatagagaaagagagagaagaaaaaggaagaaagaggagaggagagaagatgcgcagtggctcacgtctgtaatcccagcactttgggaggctgaggcaggtggatcatgaggtcaggagttcaagaccagcctggccaagatggtgaaaccccatctctactaaaaatacaaaaaaaattagccaggcgtggtggtgggcacctgtaatcccagttacttgggaggctgaagaagagaattgcttgaacccgggaggcggaggttgcagtgagcagagatcatgccactgcactccagcctgggcgacagagtgagactctgtcaaaagaatggagaaagagagagagagagaggagaaagagaggaaggaaggaaggaaggaaggaaggaaggaaggaaggaaggaaggaaggaaggaaggaaggaaagaagggagggagggagggagggaaagaaagcaagagaggccgggatgcagtggctcaagcctgtaatcccagcattttgagatgccaaggtgggctttgaggtcagacttcaactggattaggattagccctgctgggagaagagaggactctggcacccactgccagttctgccatctgcacccatttatctggggccccaatgcccgcccagcctctctccctctggtctcatccttgcgggctaagggtgcacttgcagctttccactctgccctctgaaaccttaagggtgccattagttaagtcagacaagaagactgacactcaaaaataaagttggttaagtgcaaattgtcagacccagaaacctgaatatcactgatcttcagaaaacgcacatgtgccagggccttcattggcactcaataaacgctgaatcgatggatcagtaaatgaatgaatggtgagcaaatctgatatgaccggaaggaaggagtggaagttgcttgtggagagacgagcaggactcagattgaaaggagtcttgaaaaccaggagcgtggacatgacctggcggcagcagggagccacggtgggttctaggcagggagcgacgccatctgatttacctttgaggacctcattgccaagaggaagttaatcaaatctgtcactagggggcactcaagtcttcccatagattgttaggtggccactggtcacagggagcttttgagcatttgaaccagttctatggagatataagtgtgaaatccacacggaatcgcaagcacttcatacaagagaaagaatgtaagatgcctcaaatagcaatgacaggggtgaaatgctgatattttgggtacactggactaagtaaattatattattaaaatttcatctgtttctttttactttttaaaatgtgggttctaggccactcggtggcttacgcctgtaatcccagcactttgggaggcccaggtgggcggatcatgaggttaggagtttgaaaccagcctggccaacatggtgaaaccccatctctactaaaaatacaaaaaattagctgggcatagtggcagggacctgaaatcccagctattcgggaggctgaggcaggagaatcgcttgaaactgggaggcggaggttgcagtgaactaagatcgtaccactgcactccagcctaggcaacagagtgagactccgtctcaaaaatatatatataaataagtaaatatatatgaaataaaatgtgggttctaaaagagttaagattgtctatgtcggttgcattagtttttattttatttcttttttattaggcaagatcacgttctgttgcccaggctggaatgcagtggtgtgatcatggctcactacagcctcaacctcccaggctcaagcaatcctcctacctcagcctcccgagtaggtgggattacaagtgccgccaccacacccggctaacttttgtatgttttgtaaacacaaggtttcatcatgttgtcccagctgatctcaaactcctgggcccaagcgatcctcctgcctcagcctcccaaagtgctaggattatggacatgagtcactgagcctgaccttgcatttatatttctattggacagcactgatttagaaaaagaagttactatttttttcaacagtcatcaggggttgaactaccctctctttttctcttatttcctcttactttggtcattcttcaagttaacaatctaccaggttgttctctttgttcattaaacgaaggtagatattcataaatacatagaccaaaaagagaggatggggtcattgtttcataaatatggaatcatattgaacatacttttttattcacaggactttctggaaacttcttagaccacctactaaaatctgaattcattctttttaattgcttgataatcatctatggtgtggatgaaccttcatttattcaaccacatccccactgatgagttttcacttggttaacaggttttattccccaccactaccaaaaagtaagcaaaaaatgctgcaacaagaattttttggctgggtgcagtggctctcacctgtaatcccagcactttcggaggccaaaggcaggaggatcgcttcagaccagttcaagactagcctggacaatgtaatgagactcctgtctttacaaaaaaatttttaaaaactagccgaacatgatggcatctgtagtcccaactacttggaagtctgaggtgagagaatcacttgagcctgggaggttgaggctgcagtgagccatgatcacgccactgcactccagcctgggcattagagcgaggccctgtctctacaaaaattaatttttatacctatgcccatacgtgctgacgattttctttccaagggaaagatttctagcaatgaggttgctgggtgaaggatctctctctctctctctctttctctctctctctctctctctctctctctctctctatatatatatatatatatatatatatatatatatttttttttttttttttttttttttttgagaccgagtctcgctctgtcaccaggctggagtgcagtggtgcaatattggctcactgcaacctcctcctcccaggttcaagcagttctctgcctcagcctcccgagtagctgggactacaggcgcgtggcaccacgcccagctaatttttgtatttttagtggagatggggtttcatcatgttggccaagatgatcttgctctcttgacctcgtgatctgcctgcctcagcctcccaaagtgctgggattacaggcgtgagccaccgtgcccggcctatatttttaattttaatagatgttgccaggttgtagatattgacaaactgatcctaaaattgatacagaaagacaaagactgagaatagcctacaaaatatcaaagaagaaccaagttggaggactgtcactacccaatatcaagacgttctggaaatctgcaataaccaagacagtattggcaaaagaagacacacagatcaacagaacagaaagtccagaaataaatccacaccaatataatcaattgatctttgacaaaagctcacaggcaattcaacggagaaaggacagtctttttgctgtctatgcaatcaatgtgttccctgcccaatgcacatacaggccaatacatggcaccagcttttcagaaaataaaagctttattgcaagtcgactgcacggagacaggaagaaacattcaaatctgtctccgggagctgcaggctggggcagcttttataagcatagggtaatgaggcgtgttctgattggatcttgcactgaggtgatgccgggaggcatgatctgattggatccggccatgggatgatgtcagggctcactctgattggatcctgggtcctgtcatgcagtgtctgcttcttaattcagtctccacccctctctcctcagtgggagcacttaggttctgcctgtggttacacagttggttcacctggacatgctcaggttatgcgaccttctacctgggggtccgtggcaactgaaaaacaactcacaactctgctacataaaagttgaactgaccgggcgtggtggctcacgcctgtaattccagcactttgggaggctgaggcgggcggatcacctgaggtcgggagtgcaagaccagcctgaccaacatggagaaactccgtctctactaaaactacaaaattagccgggcgtggtggcacatgcctataatcccagcaactagggaggttgaggcaggagaatcgcttgaacctgggaggcggaggttgtggtgagccgagatcctgccattgcactccagcctgggcaacaagagtgaaactccttcttgaaaaaaaataaaaaataaaaagttgaaccattgggaccgggcgcggtggctcacacctgtaatcccagcacattgggagtccgaggcgggcagatcacgaggtcaggagatcgagactagccgagaccatcctggctaacatggtgaaaccccgtctctactaaaaatacaaaaacaaaattagccgggtgtggtggcgggcacctgtagtcccagctactccagaggctgaggcaggagaatggcgtgaacccgggaggcggagcttgcagtgagctgagatcacgccactgcacttcatcctgggtgacagagcgagactccaaaaaaaaaaaaaaattgaaccattgggaggccgaggcgggcggatcacctgaggtcaggagtttgagaccagcctggccaatatagtgaaaccccatctctactaaaaatacaaaaattagccaggtgtggtggtgctcacctgtaatcccagctactcaggaggctgagacaggaggatcacttgaactcaggaagcagaggctgctgtgagctgagactgcgccactagactccagcctgggcgacagagtgagactctgtcttcaagaaaaaaaaaaaggtgaaccagattggtctggtgtggttacattttccacagatggtgctagaacaatcagatgtccatacgcaaaaaataggcacagactttacacctttcgtaaaaaatgaatgcagccaggtgcagtggctcacgcctgtaatcccagcacttttgggggctgaaacaggagaattgcttgagcccaagagttcgagaccggccttgaacaagtgagaacccctctctacaaaaaattttaaaactttttaaaaatctaaaaacaaaacaaaacaaaaatgaacacagaccaggcacagtggctcacacctgtaatcccagcactttagaaggccaagatgggtagatcacctgaggtcaggggttcaagaccagcttggccaagatggtgaaaccccgtctctactaaaaatacaaaaattagccaggagtggtagtgggcacctgtaatcccagctacttgggaggctgaggcaggagaatcacttgaacctgggaggtgggggttgcagtgagtcaagatcgagccactgtactccaacctgggtgacagagtgagactcaaaaaaaacaaaaaaatgaacacaaaagggaccatagtgaggtacctagaattggaaaattcacagagacagaaagtagaatggaggttaccaggggctgggggaagagggatggagtgttattattatcataattattattattttgagacagtgtctcactctgtcaccaggctgtagtgcagtggcatgatcttggttcacttcaacctccgcctcccaggttcaagagattctcctgcctcagcctcctgagtagctgggactacaggcatgcgctaccacgcccggctaatttttttgtatttttagtagagacggggtttcaccatgttggccaggatggtctcgatctcttgacctcgtgatccacccgcctcggcctcccaaagtgctgggattacaggtgtgagccacagcacccggccagtgctattatttaataggtacagatttcccgtttggaaaaagttctggagatgaatggtgaagatattatgggaaagggctcccagttcagactccaagagagggttcttagatctcgcacaagaaagaattcaggacaagtccataaagtgaaagcaagtttattagaaaagtaaaggaataaaagaatggctattccatagacagagcagccccgaggcctgctggttgcccatttttatggttatttcttgatgatatgctaaacaaggggtggattattcatgcctcccctttttagagcatagagggtagcttcctgatgctgccacggcatctgtaaaccgtcatggcactggtgagagtgcagcagtgaggacaaccagaggccactcatgtcgtcatcttggtcttggtgggtttcagctggcttctttattgcaatctgttttatcagcaaggtctttataacctgtatcttgtgctgacctcctgtctcatcctgtgacttagaatgacttaaccacctgggaattcagcccagtaggtctcaggctgattttacccagcccttattcaagacggagtcgctctggtttacatacttctgacagtgatggttgcaaaacaacgcgaatgtacttaataccactgagttgcatacttaaaaatggtttgagaactaagctccgatattttttatcttgcccagattcctatctaaggggcctgccccacaaaccataaatcctcatcagatgggttttatttaatcctatatatcgtcacttactttccaacctgactctgccataacattatgtggcaaagaagaaaataaaagtattttaccccaaaacatgtttctttaccatattttgaaatggccttgggccaggtgtggtcgctcacgcctgtaatcccagcactttgggaggcggaggcaggcagatcacctgaggtcaggagttcgagactagcctgaccaacacggagaaaccccatctctactaaaaatacaaaattagtctggcatggtggcccattcctctaatcccagctactcaggaggctgaggcaggagaattgcttgaacccgggaggccgaggttgcagtgagccaatatcgtgccattgcactccaacctgggcaacaagagcgaaactctgtctcaaaacaaacaaacaaaccttggtctccataatcttttatctgaacctgaacatttcctttctattaatcccaggtctttattttgtttgtttgtttatttatttatttatttatttagagacagagtctcactctgttgcctagcctagagcacagtgacatgatctcgactcgctgaaacctccatctcccgggttcaagagattttcctgcctcagcctccagagtagctgggattataggcacctgccaccatgcccggctaatttttttgtatttttgatagaaacagggtttcatcatgttggtcaggctggactccaactcctgacctcaagtgatccacccacttcagcctccagaagtgctgggattacagaggtgagccaccatgcccagcttaatcccaggcctttagacaaactcaaccaattgtccaccagaaaatgttcaaatttacctatagcctggaagacccgccacctcctttgaattgtcccacctttctgtaccaaaccagcgtatttctcagatgtgtttgattgatgtctcttgcctccctaaaatgtatcaaaccaagctgctcccgaaccaccttgggcatatgttcccaggacctcctgagagctatgtcatgggctatgatcactcatatttgcctcagaataaatctcttcgaatattttaaagtttgactctttgcgttgacaggttaaaatggtaaattgtggctgggcgcggtggctcatgcctataatcccagcactttgggaggccaaggcggtcggatgacttgaggtcaggaattcgagactacccttgccaacatggccaaacaccatctctaccaaaaatacaaaaattaactgggcgtggtggcgcccgcacctgtattcccagctattcgggaggctgaggcaggagaatcgcttgaacccaggaggcggaggttgcagtgagccgagattgcaccactgcactccagcctgggcgacagagcaagactctgtctcaaaaaaaaaaaaaaaaaaaaaaagggtaaattgtatgccatatatattataccatgcaaacaaacacaaagaattgtagacctatatgtcaaatacaaagctataggtgatggtgcaagaggaaggtggagaatggaagggagagaaaacaaaaataaggaaggaaggaaggaaggaaagaaaggaagggaggaagggaggaagagagggaaggagggagggagggagggggagggggaggaggggagggggagagggaaggagggaggagggaggaggagggaggaggaagggaaggagaaaaaactctacaaaactctacaacttctagaagaaaatctaggtgatcttggccgggcgcagtggctcacgcctgtaatcccagcactttgggaggccaaggcgggaggatcacgaggtcaggagatcgagaccatcctggctaacacggtgaaaccccgtctctactaaaaatacaaaaaattagccaggcgtggtggcgggcacctgtagtcccagctactcgggaggctgaggcaggagaatggcatgaacccgggaggtggagtttgcagtgagccgagattgtgccaccgcactccagcctgggcgacagggtgagacgccatccccaaaaaaaaaaaaaagtctcattggtcctttggttgtataggcagctgctgctattttcttttcttttcttttagatggagtttcactcttgttgcccaggctggagtgcaatggcgtgatctcggctcactgcaacctccacctcccaggttcagttctcctgcctcagcctcccaagtagctgggattataggcacccaccaccatgcccagctaattttttgtaattttagtagagctgggaagtcaccatgttggccaggctggccttgaactcctgacctcaggtgatccactggcctcagccttccaaagtgctgggactacaggcgtgagccactgtgcccggccagcttagattttctaatacgatttttattctttatatatattttgtattttatatgtgtatctatatgtgtttagagatggggtcttactttttttttttttttttgagacggagttttgctcttgttgcccaggctggggtgcaatggcaccatctcagctcactgcaacctccacctcccaggttccagtgattctcctgcctcagcctcctgagtagctaggattacaggcctgcgccaacacgcctggctaattttgcattttttagtagagatggggtttctccatgttggtcaggctggtcttgaactcccgacctcaggtgatatgcccgcctcagcctcccaaaatgctgggattacaggtgtgagccaccgcgcccggccgggtcttgctcttttgcccaggctggagtacaatggcatgatcacagctcactgaagtctagacctctagggctcaagccatcctcccacctcagcctcctgaatagccaacaccaaaggtgcatgccaccacacctgactaattttgtttatcttttgtagagacaaggcctcactatgttgcccaggctggtctcgaactcctgggctcaagcaatcctcccaccttagcctcctggggacctggcatgcaatcacagatgtgtgccagtgtgtcttggcacaggattcacttgctttccagcaaattgcaacaggaggtcacagagcaacagaaccgagatctgatccaagtgtctgtggagggtgcagctgccagaccctgtggcgaggtcaaatgtgcaggtgggtggctaacttgggttctgtcccttagccgtagtaacacatgaagggggaaacccctttcccttgctgcttggccagctctctggggacacaggagccaggtagggcaggggaacagaccctagggaaagcaaggtgaaagggaaaagcctggactagtggcacacacctgtaagtcccagccactcgggaggctgaggtgggaggattgcttgagcccaggagttcaagcctgcattgagctatggttgcaccactgcactgcagcctgggcacagagtgagaccctgacccaaataataatacataaaaatacagaaagagaaagaaatgacaacatgtggaagagcctacagagaagagaaacaataaagtgcttcctagtttgggggtcgtcagaagacggggccccacaggaggggactggtctttctgtgaggttcacttgaggccaggagtttctctgtttcctgatgttttggcatcttgggccttgctaatgccggaaagacagcttctcccagggtttgccgatttcttcagggttagctaatttgttggagagtttgcaaacaactggcttgtccaagagcacacggttcctatggaaagctcacaccccacaaccaccttttttgcagagctgtgacaatccaagcctgttgccctgacctgattactttagggccatgtgccaggcaattagggacagcacgtatgccccagagcctggagaaattattcaaaatagcccgtggcaactttcatctgcctcactgtgcctgtcccatggaaactataataaaggctcttacccacattttctcctgctctctccgcctcctttttttttttttgagacggagtctgcttctgttgcccaagctggagtgcagtggtgcaatgtcagctcactgccacctccgcctcccagattcagtgattctcctgtctcagcctcctgagtagctgggattacaggcagccgccaccatgcccggctaatttttgtatttttagtagagatggggtttcaccatgttggccaggctggtctcaaacgcctgacctcaggtgatctgcctgcgtcggcctcccaaagtgctgggattacaggcgtgagccactgccccaggtctctctctctctctttttttttttttttttttttttgagaacagggtcttgctctgttgcccaagctggtatgcagtggtgcaatcacaactcactgcggccttgacttcctgggcccaagcaatcctctcacctcagcctcccaagtagctgggaccatggggcatacaccatcatggccagcgtgtaaaaatgggatcttgctatgttgcccaggctggtctcgaactcctggcctcaagcaattctcccaccttggccccccacagtgttgggattacaggtgagagccactgtgtctggcctcctgctacattttaaaataagaagcaggggccgggcgtggtggctcacgcctgtaatcccagcactttgggaggccgaggcgggcggatcacgacgtcgggagatcgagaccatcctggctaatgcggtaaaaccccgcctctactaaaaatacagaaaaattagccgggcgtggtggtgggcgtctttagtaccagctactggggaggctgaggcgggagaatggcgtgaacccggaaggcggagcttgcagtgagccgaatcgtgccatgcactccagcctgacgagactctgtctcaaaaaaataaataaataaatataaaataaaataagaagcaggtcaggcacagtggctcatgcctgtaatcctagcactttgggaggctgagacaggcagatcacctgaggtcaggagtttgagaccagcctggccaacatgatgaaaccctgtctctactaaaaatacaaaaaattagctgggcatggtggcaggtgcctgtaatcccagctactcaggaggctgaggcaggagaatcgcttgaacccaggaggtggaggtcgcagtgagctgagattgtgccactgcactccagcctgggtgaccaagcaagattccattaaaaaaaaaaaaggctgctggttgaggtggctcacgtctgtaatcatgtcactttgagaagctgaggagggaggatcgcttgaggccaggagtttgagaccagcctgggtggcatagcaagactccatctctaaatataaggtttttttcagccaggtgtggtggctcattcctgtaatcccagcgctttgagaggctgaggtgggtggattacctgatgttaggagttcaagagcaacctggccatctccagcctgggcaacaagagcgagactccatctcaaaaaaagcaaaacaaaaaaaatacttttttctaagagacagtgtcacctaggctggagtgtcacccaggctgtgtcacccaggctggagtgcagtggcatgatttcagctcactgcagcctcaacctcctgggctcaatcaatcctcccacctgagcctcctgagcagctgggaccgaaggcatgcaccaccacacccggctaacttttgtgttttttgtagatgctgggtttcgccattttgcccggactggtctcgaactccagagctcaagacatcctcctgccttggcctcccaaagtgccaggactacaggcgtgagccactgaacccagctggctaaataaacttcctaaattgattgagacctgactcagatactttgagtttacacagctcaattcatatctgttcatgcattaaatgaatggattttctttttcttttcttttttttttttttgagatggagtctcgctctgttgtccaggctggagtacagtggcactatctcggctcactgcaacctctgcctcccaggttcaagtgattctcctgcctcagcctcccgagcagctgggattacaggcatgtgccaccatgcccagctaatgtttgtatttctagtagagacgggtttttaccatgttggccaggctggtctcaaactcttgaccttaagtgatctgcccacctcagcttcctgaagtgctagtattacaggcatgagccaccgcgcccagacttttttttttttttgagacagagttttgctctttttgcccaggctggagtgcaatggcacgatctcagctcactgcaacctccacttcccaggttcaagtgattctactgcctcacccttccgagtagctaggattacaggcacccgccaccatatctggctaatttttgtatttttagtagagaaagggtttcaccatgttggccaggctggtcttgaactccttgacctccagtaatccacccgcctcggcctcccaaagtgctgggattataggcataagccactgcacccggcctaaatgaatggattttctgctcctgttcaggggcttgggtaaagctgtcatgaggataaaaggatcagagagatgaaggggttatagaagtgggagtagtgccaggcacggtggctcaagcctgtaatcccagccctttgtgaggctgaagcagtcagatcacttgaggccaggagttcaaaactaacctgaccaacatggtgaaaccccatctctacaaaaatacaaaaattagccaggtgaggtggcaggcgcctgtaatcccagctactcagaaggctgaagcaggagaattgcttgaacctgggaggcggaggttgcagtgagctgagatcgtgccattgcactccagcctgcacaacagagagagactctgtttcaaaagacaagaaaagacaagacaaggctgggcgcggtggctcacacctgtaatcccagcactttgtgaggccgaggcgggcggatcataaggtcaggagatggagaccatcctggctagcacggtgaaaccccgtctctactaaaaatacaaaaaatttgccgggcttggttgcaggtgcctgtagtcccagctactcaggaggctgaggcacgagaattgcttgaacctgggaggcggaggttgcagggaggcggaggttgcagtgagccgagatggtgccattgcactccagcctgcacaacagagcgagactctgtttcaaaagaaaagagaagaaaagaaaagacggtagttacaggtcatagggagtgggattctgggcgtgggctatgccatatttcacaggggtgtcagcggggttgggagctccgggaattgccctcaagtcacaggttcctgctttgtgggtcctgaggcttccctctgccaaggaaaattcgggatttctttctgctaatgtctgggatcattggccactgcccaggctgcctcagtttcccctgggagaccaaaaacacaagggtgggggaagccacagagcacggggtttgcagcacctttctcaggcaggtcaggggcctcttgtgactggatgaggctattttgcctaccctgaattcacactaggagaaaatcgtgcctttcccggagtatttacccaccaaagaggagtagggctgtgaacagcgtccggagtgaggtgtccaggtatgaattatgtctctggccacatgacactagacaaatttagagattccccctaagcctcagttttctcatctgtgacatgagagaaataatactaggttggtgcaaaaataattgcgttttttgccattacctttttgttttaaagacagagtttcgctctgttgccaggctggagtgcagtggcatgatcttggctcactgcaacctccacctcccgggttcgagcgattctcctgcctcagcctcccgagtagctgggattacaagtgcgcgccaccacacccagctaattttgtatttttagtagagatggggtttcaccgtgttggtcaggctgatcttgaactcctgaccttgtgatccacctgcctcagcctcccaaaatgctgggattacaggtgtgagccactgtgcccagctttgcctttacttttaattgcaaaaaccgcaataacttttgcaccaatgcaatatttgcttctggagaggatagtgtaggttaaatgagatgttggtggataacccttagcagaggggctggcatgatccattgtggaccctataaatagcctagaaaattagaagagaagctggacgcaatggctgatgcctataatccaagcaatttgggaggccgagacgggaggatcacttgaggccaggagtttgagaccagcccgggcaacatagtgagaccccatctctaaaaataatctttaaaaattagccaagatggccgggcacggtggctgacgtctgtaatcccagcactttgggaggccaaggcaggtggatcacctgaggtcaggagttcaagaccagcctggccaacatggtgaaaccctgtctctacaaaaatacagaaaaaaaattagccgggcatgatggcaagtgcctgtaatcccagctactcgggaggctgaggcagaagaatagcttgaatctgggaggcagaggttgcagtgagccatgatcccaccattgcactccagcctgggcgacagagagagactctgtctcaaaaaaaaaaaaaaaaaattagccagccatggtggcatgcacctatagtcccagctacttgggaggctgaggtgggaggatcgcttcagcccaggagttcaaagctgcattgagctatgactgggccactgcactccagcctgggcaacagagtgagaccctgtcttaataataaaaatacagaaagaaaaagaaatgacagtgtgtggaggagctcatagaggagagaaacaatgaagggcttcctagtttggggggtcttcggaagatggggccccatgggaggggactggtctttgagttgttgaggtaatttaattcattgttctttcgtgagctaattgtatgtggaaatttatgtaaatctttggtaatcatcctttgaggaatctgctgctatcaagaaagaaaaagtcagtgtcaaccagcaaaaaaatggaaaaaatcaaatagtgattgctgttttttttttttttttgagacggagtcttgctctttcgcccaggctggagtgcagtggcactatctcagcttactgcaagttctgcctcctgggttcatgccattctcctgcctcagcctcccaagtagctgggactacaggcacccgccaccatgcccagctaattttttgtatttttagtagagacggggtttcaccgtgttagtcaggatgatggtctcgatctcctgacctcgtgatccgtctgcctcagcctcccaaagtgctgggattacaggcgtgagccaccacgcccggcctttttttttgagagtgtctcactctgtcacccaggctgcagtgcagtggcatgatctcagctcactgcaactgccacatcctgggttcaagtgattctcctgcctcagcctcctgagtagctgggagtacaggcatgcgccaccatgtctggctaatttttgtatttttttttttttgtagagatggggattcaccatgttgaccaggctggtcttgaactcctgacctcaagccatctgcccacctcagcctcccaaaatgctgggattacaggcatgagccaccgcgtctggcctatttgaatttttttaatccatactgcaatgctagtggagaaggagaatgagttttatggtgtggtttcaagagccctgcagaaaaagtaagtatcttgaagcaggttgttattattattattattattattattattattattattattattttctggagacagtctcgctgtgttgcccatgctggagtgcagtggtgcgatctcaggtcactgcaacctccgcctcctgggttcaagcaattctcctgtctcaggctcccaagtagctgggattacaggcccaagcctccacgcccggctaatttttgtatttttggtagagacagggtttcatcatgttggccaggctggtcttgaactcctgatctcaagtgatccacccacctcagcctcccaaagtggtgagattaaaggtatgagccactgcacacagcctatgttgtttgtttgtttgttcgcttgtttatttctgagacagagtctcactctgtcgcccaggctagagtgcagtggcaccattgcagctcactccagcctcgacttcctgggcccaagtgatcttcccacctcagccttccaagtagctgagactacaggcatgggcacaaaatgttgaataaaataacacagccttcgttaccaggaatcctcagtaaagcaaagctcatctactactatttagttttcggtttatttgtggactcttcggttcttgcagtgatgtatgtactcatgatgaattcttcttggacactgaaccatatcctctcactgtggaaagctgggaattacgctagtattgttcatccaccacgtggtatgcgggcatttctgaacattccctgacttcagaaaaagatgaccccaggacatttggtggtttctgttggccagttcagacctgaaattaatcttcctttgcagatcagagcttttgagaaatagttaaacaagatgattgaggccaggcgcggtggctcatgcccgtaatcccagcactttcggaggctgaggcaggtgggttacctgaagccaggagttcaagaccagcctggccgacatggtgaaaccatgttactactaaaaatacaaaaaacattaaccaggcatggtggcatgtgcctgtaatcccagcttcttgggaggctgaggcatgagaattgcttgaacccaggaggcggggttgcagcgagctgagatcgtgccactgcactccagcctgggtgatagagcaagactctatctcaaaaacaagatggtgattgagtcacctcctttattgaaacctgttctcattagagattgttgtaccaaagatgatgagacttcagatgaaccaactaagaaagctgtctgaggatttaggaattttaaaaggtgtggaatttcaaagaaatattccattttgatgaagtaaaggttaaagaagtgcttgtctgaagagacagttgatctgcataccacgcagaacaagtattttgggatgggtgttgtgaaagttttggccaacacaatttttttttttttttttgagacagaatcttgctctgccatccaggctggagtgcaatagcatgatctcggctcactgcaagctccacctcccaggttcaagcgattctcctgcctcagcctcctgggtagctgggactacaggcaggtgccactatgcccggctaatattttgcattcttagtagagactgggtttcacagtcttagccaggatggtcttgatctcctgacctcgtgatctgcccacctcagcctcccaaactgctgggattacaggcgtgagccaccatgccggccttttttttttttttaagagatagggtcggtccaggccaggtgcggtggctcacccctgtaatcctagcactttgggaggccgaggcaggcagattgcctgagctcagaagtgtgagaccacgctgggtaacatggtgaaaccccgtctctactgaaatacaaaaaattagccagatgtagtggtgtacgcctgtagtcccagctactcgggaggatgaggcaggagaattgcttgaacccgggagatggaggttgcaatgagctgagatcactccagtgcactccagcctgggtgacagagtgagactccatcccccaaaaatatatatataaataaatccaataaataaataaatgagatagggtcggttgggcatagtggctcacacctgtgatcccagcactttgggaggccgaggcgggtggatcacctgaggtcaagagttcgggaccaccctggccaacatggtgaaactccgtctctactaaaaatacaaaaattagccaggcgtggtggtgcatgtctgtaatcgcagctactcgggaggctgaggcagggaattgcttgaacccgggaggcggaggttgtagtgagccaagatcgtgccactgccctccagcctgggcgacagagcaagactccatcaaaaaaagaaaaaaaagactgggtctttctgtcacccaggctggcgtgcagtgacatgattatagctaactgcaacctcgaccactgcggctcatgtgatcctcctgcatcaacctcctgagtagctgggactacaggtgcacacaaccacacccagttaatttttaaagtttttgtagagatgaggtctcaatatgttgccagagctggtctcaaactcctgggctcaaggagttcaaaagttacgaaaattataagttacctttttgagagagagagaaagtcttgctatgttgcccaggctggagtgcggtggttattcacagacaggatcatggcacactacagccttgaactcctgggctcaaatggtcctcctgcctcagcctcccaagtaactgagaatacaggtacatgcccagctaaaagttactttaattaaaggtaactatctaggccgggcacagtggctcacgcctgtaatcccagcactttcggaggccgaggcgggcggatcacgaggtcaggagatcgagaccatcctggctaagacagtgaaaccccgtctctactaaaaatacaaaaaattagcagggcgtggtggcaggcgcctctagtcccagctacttgggaggctgaggcaggagaatgacgtgaacctgggaggcagagcttgcagtgacccgagatcacgccactgcactccagcctgggcaacagagcgagactccatctcaaaaaaaaaaaaaaaaaaaaaggtaacaacctaggcagggtgcggtggctcatgcctataatttcagaactttgggaggctgaggcaggcagatcacgaggtcaggagatcaagaccagcctggccaacacggcaaaaccccatctctactaaaaatacaaaaattagctgggcgtggtggcacctgcctgtaatcccagctactcaggaggctgaggcaggagaattgctggaacccgggaggtggaggttgcagtgagctgagatcgtgccattgcactccagcctgggtgacaggacaagactccgtctcaaaaaaaaaaaaaaaaaaaaaaatctatagtaaatgccttctaaaaccgtatctttatcactgccctataactctatatagattcttggctactaagccaatagctgggatgatataaatgtaatgcagctgctatctgaataacaagcatggaaaagtgaatatgtgtgtgtgcagataatgctctacaaacatacaacttatgacattttctgtaaccataatcaatttcttgtagttcagtgagttgacccccttcatgatcagtgttaggggcatgtgaaagaggtgattggttgattgattgattgattgattgatttagagacagagtctctgtctgtcacccaggctggagtgcaaaggtgtgatcttggctcgctgaaacctccgcctcctggctgcaagcaattctgctgcctcagcctcccgattagctggaaatacaggcacctgccaccacgcccagctaatttttgtatttatattgaagacgggatttcaccatgttggccaggctggtctcaaactcctgaactcaagtgatccacccacctcggcctcccaaagtgctgggattacaggcatgagccaccacacctgaccaaagaggtgtattattcttttgcaatttccttttaaccagctggttttgttatctacttctgattatgtcgctgatacaggccattttctgttatcagatcaaaaagcagcaaagccaggcatagtagtgcacaactatagtctcagctactcaggagcctgatgggagaattgcttgagcccagattgaggccacattgagctgagatggcactaccatactctagcctgggtgacagagcgagaccctgtctcaattaaaaaaagaaaagaaaagaaacaggccaggcgcggtgtctcacgcctggaatcccagaactttaggaggccgaggcgggtggatcatttgaggtcaggagtttgagaccagcctggccaacatggtgaaaccctgtctgtactaaaaatacaaaaattagccagatatggtggcaggcgcctgtaatcccagctacacaggttgctgaggcaggagaatcgcttgaacccaggaggcagacagaggttgcagtgagccgagattgcgccattgcactccagcctaggtgacagagtgagactccatctcaaaaaacaaacaaacaaagaaaacacaaaacttttatggaattccagaatcctttcttccttcactacttcctctacttttgctctatttcaaattatttatttttgacctcataattttttgtgtgtggatgggtaggcagaatgaattaacagtacaaatcttacctcaaagactagctataaaataagaaaaagcgccaagccagagtttgaacttccaggttataatactgattctgtcatcaaacagctttgtgacaccaaaggagtttactaagttctttggatttatttattattatgttagatggagtgtcactctattgcccaggctggagtgcagtggcacaatctcggctcactgcaacatctgcctcctgggttcaagcgattctcctgcctcagcctcccgagtagctgcgattacaggcatgtgccaccttgcccagctaatttttgtctttttagtagagacggggtttcaccatgttggccaggctggtctcaaactcctggtctctagtgatttgcctgccttggcctctcagagtactgagattacagacgtgagccactgtgcccagctggaaatggattttaaatctctgagatgtgaaagcattttctaagcttaagagcagagggcaaaatggtcaagcaatgtactgagttgtctctctttaaaacttaaagaggaattcttagccaggtgctgtggctcatgcctgtaatcccagcactttgggaggccaaggtgagagaatcacttgagcccaggagtttgagaccaacttgggcaatgtagtgagaccacatctctgcaaaaaataaaaattagctgggtatggtcgcacatgcctgtaatcccacctacttgggaagctgaggtgggaggatcacttgaacccaggaggctgaggcttctgtgagctatgatagttccactgcaccccagcctgggcaacacagtaagactctatctctaaaaaagaaaagagaatgagacatcttttgtctattttaatctaacctttttttttttttcctgaagactcttaccccagcttgcagcttttttttttttttttttttttttgacagagttttgctttgtcgtccaggctggagtgcagtggcgtaatttcggctcactgcaacctctgcctcccaggttcaagtgattctcctgtctcagcctccctagtagccaggattacagacacacaccaccatgcccagctcatttttgtatttttagtagagatggggttttgccatgttggccaggctggtctcaaactcctggcctcaggtgatccaccctcctcagcctcccaaagtgctgggattacaggcatgagcgactgtgcccggccagcttgctgcttttagcataaatttcaggcttctggtgagctcttggcaacatgtaccaagaatcataacgtgtttgcctttttccagccagtatttccactgctgggaatccatgagaaagaaatatgagaaataggcaaatatttacatataacaatgcttctgttattgttattttaatattcagttagtgcaaagcctgaggtatccggtacgctgtgtacaatcacgtgataagatccaatatgcagttatgaaaaatgtttgtagattttctttaacaatatgtaaaatattttcatactatttttacagaaaaaagcaggatattgggaggccaaagcaggcggatcacttgaggcaaggtgtccaaggccagcctggccaacatggtgaaaccccatatctactaaaaatacaaaaaattagcagagtgtggtggcacaagcctgtaatcccagctatttgggaggctgaggcaggagaattgcttgaacctgggaggcagaggttgcagtgagccgagatggcaccattgcactccagcctgggtgacagagtgagactccatctcaaaaaaaaaaaaaaaagaaagaaaaagaaaaatgcaggatataggataaaacatttttttctagatgttgccgtaattaaaaattttgttgcctatatggccaggagtggtggctcacgcctgtaatcccagcactttgcgagccgaggtgggtggatcacttgaggccaggagttcgagatcagcctgggcaacatggtgaaaccccatctctactaaaaatacaaaaattagccgggcgtggtggtgcatgcctgtaatgccagctactcgggagggtgaggcatgagaagtgcttgagtccgggaagtggaggttgcaataagctgagattacaccgctgtgctccaccctgggtgacaaagcaagactgactcaaaaaaaaaaaaaaaaaaaaaagatgtttcctatatagcaacaggaaatctcactctttgctgagagaaatgccaaacagtacagccactctagaagacagtgtgacagcttcttacaaaactaaacatactcttaccatataaccaattaatttcactcctagatatttacccaaacgagttgaaagctcatgtctacaagaaaacccgcacatgggccaggtgcagtggctcatacccgtaatcccaacactttgggagaccgaggcgggcagatcacgaggtcaggagttcaagaccagcctggccaatatggtgaaaccctgtctctactaaaaatacaaaaattagctgcgcgtggtggcatgtgcctgtagtcccagctactcaggaggctgaggcaggagaatcacttgaacccgtgaggcagaggttgcagtgagccgagatcacaccactgcactccagcctgggcgacacagggagactccgactcaaaaaaaaaaaaacaaactggccgggtgcggtggctcatgcctgtaatcccagcactttgggaggccgaggcgggaggatcacgaagtcaggagatcgagaccatcctggctaacacggtgaaaccctgtctctactaaatatacaaaaaattagccgggcatggtggcaggtgcctgtagtaccagctactcgggaggctgaggcaggagaatggcgtgaacccaggaggcagagcttgcagtgagccgagatggcgccactgcactccagcctgggcgagagagtgagactctgtctcaaaaccaaaaaaacaaaacaaaacaaaacctgcacacggatgtttacagcagtattattcataattgcataaaacttggaagcaaccaagatgcccttcgggagttgaatgaataaataaacagtggtactttcagacaatgggaactcattaattaaaataaatgagctcttgctgggcacagtggcacaagcctgtggtcccagatactcaggaggctgaagtggaaggattgcttgagcctaggagttccaggtcagactgggggacagagaaagaccatgtctctaaataaattaatttaaattacaatatattttttcttttcttttcttctaacacagaatctcactcttgtcacccaggctggagtgcagtagtgctatcttagctcagtgcagcctccgcttcccaggttcaagcaattctgcctcagcctcctgagtagctgggactacaagtgcgtgccaccacgcccggctaatttttgaatttttagtagaaacagggttccaacaagtttgccaggctggtctcgaactcctgacctcaagtgatctgcccaccttggcctcccaaagtgctggaattacaggtgtaagccactgtgaccagcctaaaaaaattttttaattatccaggcatgatggtgcacctgtaatcccagctactcagggaggctgaggcagggggatggcttgagctggagaggtcgacactgcagtgaactgtgatggtgccactgcactccagcctggatgacagagaaagagcctggctaaaaaaacatataactagccgagcaaaactccttctcaaaaaaaaaaaaaaaaaaaaagtgagccctaatgtaggctgtggactcggggtgatgaggacgggtccctggagattcatcaagtataaccaatgcaccactctagtggcggacattgataaggaggaggctgggcttggggagcagggtagatatatgggaaatctctgtactttccactcaattttgctgcaaacctgaactgctataaatcagaacgtttatgggctgggtgcagtggttcacgcctgtcatcccagcactttgggaggccaaggcaggaggatcgcttgagcccaggagtttgagaccaccctgagcaacatagcaaggccccatctctacaaaaaaaaaaaaaagaaagaaaatacaaaaattagccaggtgtggtggtgtgcatctgtagtcccagctactcgggaggctgaggcagaaggatggcttgagcctgggaggtggagttggcactgagctgtgattgcatcactgcactccagcctcagtgacagagccagaccttgtcttaaaaaaaaaaaagcccatgggaaaacaaatactgttttcctctgcttgagtgaaagaagccagtctcgctgggcgcggtggctcacgcctgtaagtcccagcactttgggaggccgaggtgggcagatcacctgaggtcgggagttcgagaccagcctggccaacatggagaaaccccgtctctactaaaaatacaaagttagctgggcatggtggcgcatgcctgtaatcccagctactcgggaggctaaggcaggagaatcgcttgaacccaggaggtggaggttgcagtgagccgagatcgtgccattgcactccagcctgagcaacaagaatgaaactccatccaaaaaaaaaaaagaaaagaaagaaagaacccagtctcacaaggctatccagtgtgtgactgattccatttatacaacagtcccggaaaggctaaattatggcgacagagagccgatcagtggttgtcaaggagaaggaaggaaggatgtgactcctaacgggcagtgtaagggaattttacggggtgatgaagttgttctttttctttctttctttctttctttttttttatttgagacagagtctcgctctgtcacccaggctggagtgcagtggatctcggctcactgcaacctccatcccctgggttcaagcaattctcctgcctcagccccccgaggacctggaaccacaggtgtgcgccaccatgcctggctaatttttgtatttttaatagagacggggtttcaccacattggccaggctggtctcaaactcctgacctcaggtgatccacctgcatcagcctcgcaaagttctgggattacaggcatgagccaccccatccagcattttttttttctttttttttttctttttctttttctttttcttttctttttttttttttctttttttttttttttttttttttttgagacagtcttgctctgtcgcccaggctggagtgcagtagtgtgatctcagctcactgcaacctctgcctcccagattcaagtgattcttatgcctcagcctcccaagtagctggtattacaggcatgcgccaccatacctaggtcatttttgtatttttgatagagatggggtttccccacgttggccgggctgctcttgaaatcctgaccttatgtgatccgctggactcggcctctcaaagtgctggcgttacaggcatgagccacagcgcccagccagattttaatttttttttttatagatagggtctcactacattgcccaggctggactccaactcctaggttcaagcaatgccgcctcggcctcccaaagtgctgggattacaggtatgaggtgctgcatccagcctaaaaaattgatttaatgcaaaaaaaaaaaagaaaatcctggtgcctgacccctggctgtcctcagctggcccataagaccctgatgacttttgagctctgaatcaagggttggcatatctagacctgctgcaagctacagatactcagaaccatgcacgaggttgcaaatcctacatatgatttccagaatccacatcccatctgcactctttctggtagagcacaccttgttcctggggctccaggacaaatgggtgcatcaaagctaacttccggccctgggcagtggctcacgcctgtaatcccagcactttgggaggacgaggcaagaggatcacctgaggtcaggagttcaagaccagcctggccaacaaggtgaaaccccatctctactaaaaatacaaaaattagctggatacggtggcccatgcctgtaattccagctactcaggaggctgaggcaaaagaatcgcttgaacctgggaggcggaggttgcagtaagctgagctcatgccactgcactctagccttggagacaaagtgagattctggcaaaagaaaagaaaagaaaaaaagctaccttccaccagccacaatggctcacgcctgtaatcccaacattttgggagcccaggagtttgagaccagcctgcagcctgggcaacatagcaggaaactctctctaaaaaggaagaaaagaaaaattcgccaggcatggtggcgcacacctgtagtcccagctacttggaaggctgaggtgggaagctggcttgagcctgggaaattgaggctgcagtgagctatgatcatgccactacactccagcctgggcaacagagtgggaccttgtctcaaaagaaaaataaaaagtctaccttctacgtggtctctctggctacctcagtcatactgatcccttggctatactgatcattcagtcacatcccactctgacccctggactcccctggccactgacctatagtgacctgctctctttggtccctgcagggagacacatttgaaacctacaagtacccaggggaaaaaaaaaaaaaaaggccattacttccttaatctgtatctgtttttaagtggaattgtatccataagcaacccagagtgctattatgtttcaaatttatataaacagtatcacactaaactaacattgcacaacttgaatttctttttgaaacagcaccacattaagatacatttatattgacatagagtagagctggagagagtgagagtgagagcaaggcaagagagagaaagagagacacacagacagggagagttacttattccttttcactcctgtttaatattccattaccttaccattacatttcgttctcctttcatttctctactccctcattgatggacgttctgatagtttctttttttcttttcttttttttttttttttttttttttgaggcagagttttgttcttgctgcccaggctggagtgcaatggcgcgatcttggctcactgcaacctccaccacctgggttcaagtgattctcctgccttggcctcccaagttgctggtattacaggcatgcgccaccacgcctggctaattttgtatttttagtagagatagggtttctccatgttggtcaggctggtctccaactcccggcttcaggtgatctgcccgcctcggcctcccaaagtgctagggattacaggtgtgagccactgcgcccagccttttttgtttttgtttttgtttttgtttttgttttgttagagatggggttttatcccgtcacttaggctggagtgcagtggtgtaaacatggctgactgcagcctcgacttcctgggctcaggtgatcttcccacctcaggctcttgagtagctgggaccacaggtatgcaccaccatggccagctaatttttagtttttttagagatggagtcttgctatgttgtccaggctggtattgaactcctggactcaagcattcctcctgcctcagcctcccaaagtgctgggatgacaggtgtgaaccaccgagcccaacctagtagttaagttttgaggagtcaaaagttatatgtgaggggctcggcacagtggcctgtcatcccagcactttgggaggtggaggctggcagatcacttgaggtcaggagttcaagaacagcctggccaacatggcaaaaccctgtctctactaaaaatacaaaaattagccaggtgtggtggcacgcacctgtggtccagctattctggaggctgaggcatgagaatcccttgaacccaggaggcagaggttgtagtgagccaggattgtgccattgcactccagcctggatgacagagtgagactgtctcaaaaaaagaaaaaagaaaaaaagttatatgtgggtccaggtggggtgactcatgactgtcatcccagcactttgggaggccaaggtgggaggatcacttgagtccaggagttcaacaccagcctggaaaacatagcaagactcctgtctctacaaaaaattagctggacatggtggcaggtgcctgtagtcccatcaattcgagaggctgaggcaagaagatcacttgagcccaggaggtcaaggctgcagtgagctatgattgcaccactgcactccagcctgggtgacagagagagagagacagagagagagcaacggaaggaaggaaggaaggaaggaaagaaggaaggaaagcgataaatgaaaaggaggccaggcacagtggctcatgcctgtaatcccagcactttgggaggccaaggaaggttgatcctctgaggtcaggactttgtgaccagcctggccaacatggtgaaaccccgtctctactaaaaacacaaaaactagctgtgcatggtggtgggcgcctgtaatctcagctacttgggaggttgaggcaggagcatcacttgaacctaggagccggaggttgcagtgtgctgagattgtgccactgcactccagcctgggcaacaagagtgaaactctgtcaaataaaagaaaaaagagaaggaaagaaagaaaggaaggaaggaaggaagacagagaaaggaaggaagaggaagagagaaagggagggtagggagggaaggaaggaaagaaagaaaatgaaaaggacaaaaactccaaaggacaaatgagtctttcacaaaaggtgatctccaaatggctgataaatgaaagagggctgacctcatgagtcatcagagaaatgcacatgaaacccaaaatgctagcggggcgtggtggctcacgcctgtaatcccagcactttgggatgccgaggccagtggatcatgaggtcaggagttcgagaccagcctggccaagatggtgcaaccccgtctctactaaaaaatacaaaaattagtcgggtgcggtggcgggtgcctgtaattccagctactcgggaggctgaggcaggcgaatcacttgaacccaggaggcggagtctgcagtgagccgagatcacaccactgcactctagcctggtcgacagagcaagactccatctcaaaaaaaaagaaaatttaatatcaagttatactcccacactctggagagcgtgtgaaatggtacaaccgctttggaaaaccctggcaatatccagaaagctgaacaaacacctacacaatatgaatcagcatttctactcctaagtataaacttaaagaatatacattgttgcattcatccagaaactggccagaatgttcacagcacctgtgcttatcacagccagaaattggaaacaacccaaatgcctaaaaaagtttaggtaaataaactgtggtaagttcacaaaagggaagacagcggttctcaaccgggtggtgatttttttttttttttttttttttttttgagacggagtttcactcttgttgcccgggctggagtgcaatggtgtgatctcagctcaccgcaacctccgcctcccgaattcaagcgattctccctcctaagccttctgagtagctgggattacaggcatgcaccaccgcgcctggctaatgtttgtgtttttagtagaaatggggtttctccatgttggtcaggctggcctcgaactcccgacctcaggtgatccacctgccttggcctcccaaagtgctgggattacaggcgtgagccaccacgtctagtcgactgggtggtgatcttatcgcttctaagggaatatttggcaatgtctagcgatgttttgcgttgtcagaaccgaagggaggagtgttactgtcacgctgtgagtagaggcctgggatgccgctaaatacatacaatgtgtaggaacaaagattattcagctccaaatgtcaacagcagttgagaaaccttgctataccaaatggcaacgggctggacgcggtgtctcatgcctgtaatcccagcactttgggaagccaaggcgggaggatcacttgaggtcaggaatttgagaccagcctggccagcatggtgaaaccctgtctctactaaaaatacaaaaatcagccgggcgtcgtgacacagtcctgtggtcccagctatttgggaggctgaggcaggagaatcacttgaacgtgggaggcagaggttgcagtgagctgagatggtactccagcttgggtgacagagcgagactgtctgaaaacaaaacaaaaaaaaaatggcaaggaacaataactgtaacctacaaaaatatggatgaaccacacaaacctggtgttacacaaaagaaaccaaacataaaggaaacgtcctgcttgttttcatttatataatgttcaaatagcagacagagtgattctagactgttaaaaatcaagataagggctgggcacggtggctcgcacctataatcccagcattttaggaggctaaggcatgaggattgcttgaggccaggagttccaacccagcctgggcaacatagtgaaacccatccctacaaagaaatgcaaaaatttgctgggcgtgatggcgtgtgtgcctgtagtcccagctacttagggggctgaggtgggaggatcacttgagcctgggaggtcaaggctgcagtgagccgtgatcgcaccacttcactacagcctgggtgacacagcaagaccctatctcttaaaaaaaaaatggggttaccctttgtggagagtagcagggcagggtacaatgggggacttctaggggctggtgatgttctgttcttttttttccttttttgagatggaatctcactctgtcggccaggctggagtgcagtggcatgatctccactcactgcaagttccgcctcccgggttcacgccattctcctgcctcagcctcccgagtagctgggactacaggtgcctgccaccatgcccggctaatttttttgtatttttagtagagacagggtttcaccgtgttcgccgggatggtcttgatctcctgaccttgtgatccacccgcctcggcctcccaaagtgctgggattacaggcgagagccaccgcgcctggactgttgtttttttttttttttttttggtttttttttttttgagacagagtctcactctgtcgcccaggctggagtgcagtggcttgatctcggcttactgcaagtttcgcctcccgggttcacaccattctcctgcctcagcctaccaagtaggtgggactacaggagcccgccaccatgtccagccaatttttttgtatttttagtagagacggggtttcaccatgttcgccaggatggtctcaatctcctgacctcgtgatccacctgcctggcttcccaaagtgctaggattacaagtgtgagccactgtgcccggccttttttttttttttttttttttgagacagagtctcactctgtcagccaggctggagtgcagtggtacaatctcggctcactgcaacctctgcctcctaggttcaagtgattctcctgcctcagtctcccaagttgctaggactacaggtgcctaccaccatgcccggctaatttttttgtatttttagtagagacagggtttcaccatgtcggccaggatggtctcaacctcttgaccttgtgatccacctgcctcggccgcccaaagtgttgggattacaggtgtgagccacagctcccggcctatgttctgttcttgacctaatctaggtcctggctataccctacattcacatgataaaaattccttaaggcatatatttatgattttgttcttgttgttgttgtttgttttggtttttgttttttttgagatggagtcttgctctgtcgcccaggctggagtgcaggggtgtgatctcggctcactgcagcctccacctcctgggttccagcaattctcctgcctcagcctcccaagtagctgggattacaggatgcccagctaatttttgtatttttagtagagacagggtttcaccatgttggtcaggctggtcttgaactcctgacctcaggtgatctgcctgcctcggcctcccaaagtactaggattacaagcataagccaccacacctggccacatttatgaatttatgcattgttttctttactaaaagtgtgctacacttttcttcctttcttcttcttctttgtttgtttttgagacagggtctcactctatcactcaggctggagtacagtggcacaatctccactgactacaaatcccaggcacaagtgatcctctcacttcagcccccctcgagtagctgggattacaggtgtgcaccaccatgcctggctaatttttgtattatgatagagatggggttttgccatgttacccaggctgatctcaaattcctgggcttaagcgatctacccacctcagcctcccaaagtgctgggattacaggcatgagccaccatgctgggccttatgtgtgctatatttaaacaaaagcttctaaaaattaaaaaaaaaattatcctatcttccttccacccctctgtcctgtttagaccttacccacgctgcactgggtgacttcacttctcctacctgccccctctcctacagcccctccgatagaaaacaaccaggaatggccaggcatggtggctcttgcctataatctcagcactttgggaagcccaggtaggaggatcacttaaaaattagatgaggtggcatgcccctgtaatcacagctactcaggaggctgaggcaggaggatcacttgagcctgggagctggaggctgcagtgagctacaatggtaacactgcactccagactggacaaagacaaatacaccctgtctcaagaaaaagaaagaagagagagagagaaagaagaagaggaagaggaagaggaagaagaagaagaggaagaggaagaagaagaagaagaggaagaggaagaagaagaggaagaggaagcagaaggaggaggaggagaaggaggggagggagggaaggaaggaaggaagggagggagggaggaaggaaggacccacacagtggctcacacctgtaatcccagcactttgggaggccaaggtgggaggaccacctgaggtcaggagtttgagaccagcctggccaacatagtgaaaccccatctctagtaacaatacaaaaattagcctggcatggttgtgcatgccttcagtcccagctacttgggaggctgaggcaggagaattgctcgaacccagaaggtggagtttgccctgagccacgatcgtgccacagcactccagcctgggcaacacagcgagactgagtctcaaataaaaaacaaaaaaagagaaaagaaaataaagcaaccaggggaattcctggggcacacaactaagactatgttccttcctgctctaaactctcccatggctccctattacccccaagattagatcaaagtctttattgagactcccaaggactttctctacttcagctctggttgtcttgcagcctgatctctacctgctcttgctgcttctcacatcattaaccttgggccctgaaggtgcagcttccaacttctgggcctttgcacctgcagtcagctttgcataattgcctgactgcccctggcacattcttgttctttgagattcagcttgaatgcctctgctctgggaagcatccctctccttcagaccctccctcccacccctacccggatctaggggcccaggaggctttgggctgggaagattaagaagacgatgatgaataagttggttctagcagttccttccttccttcctttttccttcgttctttctttctttctttttcttctttctttctttcatttttcttttccattaagcatttaacccccttgtacacaattcactctttttaaagaaaaaaactgaggccgggcacagtggctcatgcctgtactcccagcactttgggaggccgaggtgggtgaatcacaaggtgaggagttcaagaccagcctggccaacatagtgaaaccccatctctactaataatacaaaaattagccgggcgtggtggcttgtgcctgtagtcccagctactcgtgagcctgaggcaggagaatcgcttgaacctgtgaggcggaggttgcagcaagctgagatcacgccactgtacactagcctgggcgacagtgtgagacccagtctcaaaaaaaaaaaaaagaaagaaaagaaaaaattgaaatgtaaggctgtgtaagatttgttttgaaactacacagtgtctttttttttttttgtacagttaatgcactactgaatgtgtctttagatagccctgtcctggtggtattttcaacagccactaaccttgcctggtataatatgggggttgtaaattgcaatggaaatttaaagcaggttcttgttggtgcacagcacaaattggttatatatggggatagtaggttttttgggtttttcgtttttttttttttttttttaagactgagtctcgctctgttgcccaggctggagtgcagtggcatgatctcagctcactgcagtctctgcctcccaggttcaagcgattctcctgcctcagcatcctgagtagctgggattacaggcacccgccaccaagcccagctaatttttgtatttttggtagagatggggttttctcatgttggccaggctagtctcaaactcctgacctcaggtgatccgcccaccttggcctcccaaagtgctgggattacaggcacgagcctccgtgcctggcctaggtttcttttctttcttttttcttttttttttttttgtagtcagtgcacacatatcacacatacactggggttttacaaaataagagacaaagctctgagtcaaatgcaaaagtttagatgctcactccatggtcctttcctccagggaagtccccactccctgagccaccccaggggactcctgggctggaaagaactgagaaaccccaggcctcttgctcctccagagttgcagggggacaaggcagaaaccccaaaggtcccgagaccctgagcttggacactgcccctcttttcctgcagcctcttcctgtgtccccagccctgcactcccatcccctcccccaactctgctggcccagccctggcctccctcccgcactcatttccggaggatgccccagcctgttgcagacatgggggaagtccagcctagttggggatgtcacaagggggtggggttagggctatttcttttattttttatttttttatttttttattttttttgagatggagtctcgctctgtcacccaggctggagtgcagtggcaccatctcggctcactgcaacctctgcttcccgggttcaagcaattatcctgccttaacctcccgagtagctgggattacaggcacacgccgccacgcccggctaattttttgtattttagtagagatagggtttcaccgtgttgcccaggctggtatcgaactcctgaactcaggcaatctgcccacctcagcctcccaaagtgctaagattacaggcatgagccaccgtgcccagtcagggctgtcttatgtctagttcatactctaaatgttcagacttgacatgccccagcctatctccagccaccctcctccaccgcccagcccggcagcccacatcctcactgacacggatatcaggcaggcttccttcaagaccgctgtttttgcccgttctcaactagagcccatagccttgctcagacacacaggcttggaaggccactaactcactgccagaccttgggcaagtcgctccacctccctgatcctgcccttctgcatctaaaaagtgaagtattaaaggaaaatgcatctgtctgcacgaaagcagaaacacagctcctaggttctggttccagcggctcacaggctgtgtgactttgggccagtgtcctaacctctctgggcttcggtttcctcacctgtcaaagaggaattaagaggacccacctcacaaggctgttgcaggatcagatgagttcatttcaaatagtgtctgcagcctgagcaacttagtgggaccccatctctaacaaaatttaaaatgtggcatgaacctgtagtcccagctacttgggaggctgaagatggcttgagcctgagagctggaggttgcagtgagctatgattatgccactgtactccagcctgggcaacagagtgagaccctgtcttttttttttttttttttttttttgtgacagagtctcactctatcgcccaggctggagtacagtggcatgagagatgaaacacaccccaaccaggtgtctgccttgcagctgggactagcttctccccatacttcctcctgtctttacccaaggggccttcaactaccgtgcacctcccttctgagcagacaccaaggacatcctgtctccagcccagacacacactctgagcttcctctatgtgcacctcccacagccccctggagatctgcaccttctaacatccaatgccacatcttccctccagatctgctttcaccctgtgctccctgcccagagatgggcaccgagccaggcccgcctgcccagcatagtccaggcctggggggtagaccttcccatcctctgcctccccctcctcccttccctgggtcccccagactccagacaccctcatctcggaaccggactctgttttgctccgttctctccactcacctcccaccctgcagccctggtcactctattttttttttttttgagacggattctcgctctgtcacccaggctggagtgcagtggcgcgatcttggctcactgcaagctccgcctcccgggttcacaccattctcctgccttagcctccggagtagctgggactacaggtgcccaccaccacgcctggctaattttttgtatttttcctagagacggggtgtcaccgtgttagctaggatggtctcgatctcctgacctcgtgatccacccgcctcagcctcccaaagtgctgggattataggcatgagccaccacgcctggcttaatttttatttttatttttttgagatggagttttgctcttgttgcccaggctggactgcagtggtgcgatctcggctcactgcagtctccacctcccaggttcaaccaattctcttgcctcagcctcccgagtagctgggattacaggaaccctccaccatgcctggctaatttttgtatttttagtagagaggaggtttcaccatgttggccaggctagtctcgaactcctgacctcaagtgatctgcctgcctcggcctcccaaagtgttgggattacaggcatgagccactgcacctggccttgttgtttttttgagacagggtcacccatgctggaatgcagtggtaccatcatagcccactgcatcctagaactgtgctcaatcgatcctcccacttcagcctcccaagtagctggggccgaaagcacgtgccgccaggtctggttttgtttgtttgtttttgtagagatggggtctctatgttgcccaggctggtctcaaactcctgcccttaagcaatcctcccacattggcttcccaaagcatgggaattacaggcatgagccacactacaccggcccaacttttgtttcagtggagccccttctctcctccacagctcctcttcacactcacccaccccctcagctgagggacacttcctctttgggatcctactcatgcctcgaacatcctgttctcacccacacctccccatcaaacgcccccagtactgacctggattgaccaaggagcctgttcattagctttggctcactgatcccagaaaagaagccccctctaattaaacacgcacgaaaaccccagaacagaggcaaaaagcattgatgggaaagaactgtatcttctggaaagtaccaatatgacaatgaatccattccatgctgtagttaacaagatgcgggctataatggagattacaagctaactctcaaaaccaaaaaaagaaataattcattgaaaggttttttttttgaagggaaggcatttttttcctctgcaaatttgtatgcaatagtttacatttaactttccagcatgattctagagagtcaatttttggaaaaatgaacacatttaaaaaaaaatgcagccaggcgcagtggctcatgcctgtaatcccagcactttgggaggccgagacgggtgaatcacgaggtcaggagatcgagaccatcctggctaacatggtgaaaacccgtctctagtaaaaatacaaaaaattagccaggcgtggtggcgggcgcctgcagtcccagctactcgggagactgaggcaggagaatggcgtgaatccgggaggcggagcttgcagtgagccgagatcaaaccactgcactccagtctgggcgacagagcgagactctgtctcaaaaaaaaaaaaaaaaatgcttgtaggtagtgtggtttgaattgtgtcctccaaggagatttgttaaagctgggcacgtgtgaatttaaccttatttagaaacagagtctttgcagttgtaaccaagttaagatgaggttatcctggattaaagtgtgatatgatccaatgattgctggccttctaagaaggtcatgcatggcctgacgtggtggcttatgcctgtgtcccatctactcaggaggctgaggcgggaggattatttgaacccaggaggtcctggctgcagtaagctatgatctcaccattgcactccagcctgggccacagagcaagacactatctctgaaaaacaaaacaacagaaagaaaagaaacaaaaagccggccaggtgcagtggctcatgcctgtaatcccagcactttgggaggtgaaggtgggcggatcacaagatcaggagttcgagaccagcctggccaacatggcgaaacctgtctctactaaaaatacaaaaaaaaatgagccgggcatggtggctcgtgcctgtaatcgtagctactcaggaggctgagccaggagaatcccttgaacccaggaggtggagcttgcagtgagccgagatcgcgccactgcactccagcctggatgacagagcaagactctgtctcaaaaaaaaaaaaaaaaaaaaaaagcccttccccacactgaaatacactcaaattattattattattattattattattattattattattattttgagacagagtctcgctctgtcgcccaggctggagtccagtggcgcgatcttggctcactgtaagctccacctcctgggttcacgccattctcctgcctcagcctcccaagtagctgggactacaggcgcgcctgccaccacacctggctaatttttttgtatttttagtagaaatggggtttcaacatgttagcaaggatggtctcgatctcctgaactcgtgatccacccgcctcagcttcccaaagtgctgggattacaggcatgagccaccgcacccggcctcaaattatttttaatttttatttttcttcagacaagagtctcactctgtcacccaggctggagtgcagtggtacaatcacagctcacagctcactccagcattgaactcctggtctcaagcaatgctcccacagcctcccagagtgctgggattacaggtatgagccatggggcttagccgcaaaggctttttttggggtaggtcgggggctgatgtacaactgaatgcacaggaaaggcctttctaagaataaaataaacataaaagtcaccaaagggctgggcatggtggcccaagcctgtaatcccagcactttgggaggctgaggcaggtggatcacctgaggtcaggagttcgaaaccaccctgaccaaaatggtgaactctgtctctactaaaaatgcaaaaattagctgggcatggtggtgcacgcctataatctcagctactcgggaggctgaagcaggagaatctcttgaatccaggaggcagaggctgcaatgagccaagatcacaccactgcactccagcctgggtgacagagcaagactccatctcaaaaaacaacaacaacaaaaaaaaaaaatggaggaagaagattgaagctcacagaataagaagtaatttctttaatactaaaaagagcttctatatatattttaccacagtaaaagtaaagaggctctataaatcaataacaaaaaggctgtcgcctgcagaaaaacaaacaaacaaacaaaaaaaaaacgtttccagggaaagactagaggtccacgtttaaaaatgttttattttaaaggccagacatggtggctcatgggaggctgaggcgggtgaatcacccgaggtcaggagttcgagactagcctggccaacatggtaaatccctgtctctactaaaaatagaaaaaattagctaagcatggtggcgggcacccgtaatcccagctacttgggaggctgaggcaggagaatctcttgaacccggcaggtggaggttgcagtaaactgagatcacaccattgcactccagcctgggtgacagagcaagactccatctcaaaaaaaaaaaaaagttttactttagagacagtgtcttgctctgttgcccagtctagagggcactggtgcaatcatagctcactgcagctgcaaactcctgactcaagtgatcgtcctccctgagcctcctgagtagctgagactacaggcatgagccaccacgtctggacaagatccacttacaaatgtgtatatagaaagacagaaccaggctgggcacagtggctcacacctgtaatcccagcgctttgggaggctgaggcaggtggatcacaaggtcaggagatcgagaccatcttggctaacacggtgaaaccccgtctctactaaaaaaaaaaaatacaaaaaagtagctgggtgtggtggcaggcgcctgtagtcccagctactcgggacgctgaggcaggagaatggcgtgaacctgggaggcggagcttgcagtgagctgagatcgcgccactgctctccagcagcctggacgagagtgcgagactccgtctccaaaaaaaagaaagacagaacctaactatttcccaggctcatctcaaactcctgaccttaagccatcctctggccttgacctcccaaagtgctggaattacaggcatgagccaccgtgcctggctctgagatccagtttttaaacacagagatgttcaacctcactcgaaataataaaaatgcaggccaggcgcggtggctcatgcctgtaatcccagcagtttggaagaccgaggtgggcagatcacctgaggtcaggagttcaagaccatcctggccaacatggtgaaaccccgtctctactaaaaatataaaaattatccgggcatggtggcaggcgcctgtggtgccagctacttgggaggctgaggcaggagaatcgcttgaaccaggcaggtggaggttgcagcgagccgagatcacgccattgcaccccagcctgggggacaagagagagacttcgtctcaaaaaaataaataaataaataaaataaaaaataaaaatgcaaatgagaactacatacttttaaacctctcagttagcaaagattagaatgtttgataacatgtggaggatgagtcctttgtggagaaacctttggcaatagttatccacgatacacctgctcacaccctttgacaagtaattccacttctaggaatttactgatgagatctcttcatgctgggttgacatatgacctctacggcaggttattcaattcatcgttgcttggatcaaaaacaaccgcctagaccaggcgtggtggctcaggtctgtaatcccagcattttgggaggctgaggcggacagaccatctgaggtcaggagttcgagaccagcctgaccaacatggcaaaaccccgtctctactaaaaccacaataattagccgggcttggtggcaggcacctatgatcccacctactggggaggctgagtcgggagaattacttgaactggggaggcagaggttgcagtgagccgagatcgtgccactgcactccagcctgggtgacaagagcaagactctgtctccaaaaatgcaaccaaacaacaacaacaaacaacgaaaatcgcctagtccatcaataggaaactgataagcaaagtctggctcaaccgtggcatcctatgtagccgctaaaaagaacaatatggggacaggtgcactgcctcccacctgtaatcacagcactttgggaggccaaagtgggaggctcacttgaggccacaggtttgagaccagcctgggcaacacagtgagaccccatctctacaaaactttaaaaaattagctggccatgatagtgcacactgtagtcccagctacccaggaggctgaggtgggaggatcacttgagcccaggaggtcgaggctgcagtgagctatgatcacaccactgcactccagcctgggcgaaagaatgagaccctatctctgaaagaaaagaaaaagaaaaacaaaacgaaacagaaaaagagcaaagtggttcccaaagtatgcatatatcaaaagatcacactgtacctggtaagtatatacaattaatatttgtcaaataaaagaagaacaagatggtgagaactgctgaactctgtgaatggatcaaaaaccttcgacttgaaaacttgaaataggcaaactggatggtatgaaaattatatctctaaagctgttaccaagcaacacaaagtaaaacactcagtttcccaagaaagaaaaaggcaggaaggagacccccatctctacagaaaataaataaatacataaatgagctaggtgtagtggtgcatgcctgtagtcccagctattctagaggctgaggcaggaggatcacttgagcccaggagttgtggaggcttctgtgagctatgattgtgccactgccctccagcctgggtgacagagggagatcctgtctcaaaaaaagaggccgggcgcggcggctcacaccagtaatcccagcactttgggaggcggaggtgggtggatcacaaggtcaggagatcgagaccatcctggctaacacagtgaaactccgtctctactaaaaatacaaacaattagctgggcgtggtggtggacgcctgtagtcccagctactcgggaggctgaggcaggagaatggcgtgaacctgggaggcagagcttgcagtgagccgagatcacgccactgcactccagcctggcgacagagtgagactccgtctcaaaaaaaaaaaaaaagcaagcaagaaagagggagatagagagggaaggaaggcaggaaggaaggacaaaaagaaggaaagaaagaaaacaggaattcagagggaaagggtggggagggaggtgagggataaaagaccatatatcggccaggcgcggttgctcctgcctgtaatcccaacactttgggaggccgaggcgggtggatcacctgaggttgggagttcaacaccagcctgaccaacatggagaaaccccgtctctactaaaaatacaaaaaaaattagccaggtgtggtggcgcttgcctgtaatcccagctactcaggaggctgaggtaggagaatcacttgagccccggaggcggaggttgcagtgagcagagatggcgccactgtactccagcctgggcaacaagagtgaaaccccatctcaaaacacacacacacacatatcgggtacagtgtatactgctcaggtgacgggtgcaccaaagtctcagaaatcaccactaatcaattctttagtggttatttggccatgtagccaaaaaccacctgtaccccaaaaactattgaaatgttttttagaaaggatattttgacacaaagagaaaaaaacccaactgcttccagggttaccctaaagtcctccccatcgagtctaggagaggggatggtgtcttaaataggcgagtgctggcacaggggcgcttgtggtagctgtgtgaccttgggcaagtcatctcacctcttggtgttgtacttgagcgagttagagaaaacgccacactttgagacgaattaagagtccgtttatttagctggcggccaagagacggctaacgtttaaagttttcttggccttgaagaagggactagattttcttttatactttggtttagaaaggggagggggggtctagttaaaacaattttacagaagtaaagtaggcaaaaaagctaaaaggataaatggttataggaaagtaaacagttctaggtgcaggggctttaagactattgcaaggtgatagacgcggggctttgggcgttatcaatcagacgaattcctgggaactgcagatattgctcgccccagtatcttatcgattaattgcattcttggatgtgctgggagtcagcttgcacaagttaagtctttgaggaagaggctgctagtgaaagagccaagatggagtctgtctggctctcttagctaagggagagtcaattcaggtggaaacaaggctaggtgattaaaggaaagggagagtctaaaaacagggttagtaaaaacaaggttgggcattacattggtagggtgaccaagcgtcatggtttgcttgggactgtcctgacattagccctaaaaattccatgtcatgcgcatccatgtgaagagaccgccaaacaggctttgtgtgagcagtaaagcttttcaatcacctgggtgcaggcgggctgagtccaaaaaaggagtcagcgaaggaagatggggtgaggctgttttataggatttgggtaggtagtggaaaactacagtcaaaggggtttgttctctggtaggcaggggcggaggtcacaaggtgctcagtgggggagcttctgagccaggagaaggaatttcacaaggtaatgtcatcagttaaggcaggaaccaggcattttcacttcttttgtgattcttcagttgcttcaggccatctagaaatacacgtgcaggcttggactcggaggcttgacattctgtgttgcaggaaattcctcagtccccagaacgtgggatagctggtgacaatgcagctggctccaggttttgtttttgtggttttgtccttttttttttttttttttttgagatggagtctcactttgtcacccaggctggagggcagtggtgcgatctcactgcaacctccgcctcctgggttcaagcgattctcctgcctcagcctcctgggtagctgggattacaggcatgagtcaccgtgcccggccaaggtttttcttctttgctgaatggagataatggcaggcagagctaggttaaaagcacctcctcccagttcatccaccttgtggctgtgtggctttgtgtagcttcctgcaccactctgggctcatctctaaaatgggatttttctttttttttttttctttgagacagggtctcgctctattacccgggctggagtgcagtggcgcaatcatggctcactgcagcctcgacctcctggactcaagtaatcctcctgactcagccttccaagtagctaggactacaggtacatgccagctaattcttaaaattctttaggctgggcgtggtggctcatgcctgtaatcccagaactttgggaggcgggcggactacctgaggtcaggagtttgagaccagcctggccaacatggtgaaaccccatctctactaaaaatacaaaaattagccaggcatggtggtgcacccctgtgatcccagctgctcctgaggcagtagaatcgcttgaacccaggaggcagaggttgcactccagcctgggtaaccaagtgagactccgtttcaaaaaagaaaaaaatgaaaaacctcttgggctcaagcgatcttcccaccttggcctcccaaagtgctgggactacaaggcttgagccatcacagctggcctaaaatgggaagtttaagtgcacctgcttcacagagagggccggtcatatccatctttttacatcactttgcacaggccctggcactgaccaggttgtcactgctccaggacaaggtttgccactgccctctcctcacccagggttctagggctgtgattccactcaaccactaggaacctcaggtgggtgcagggcctggcttggcaggagacatcatcaatgagaaccggttagcctgcttgctggactcatgctgggttgccaagtgccctgggaagctgggcaggggacaggtggcaggtgggagagatcaggtgccaagtacctattcgggtagatgaggatatttaggcatggagcaggggggacccttggagaaaggcgagcagaggaggtggccctcactgccaccactagcctcccctcatcgcctgagttctggtaattttacctctaaagccccctggaatccctccctcttctcctattcatcacccccgaaccaggccccaggtcctcccatccagctgcccacggtagagtgacaccttcccagcctcccactctgttctttcctaattttaagtccaattgttggccaggtgcattgactcatgcccataatcccttgagggatcactcgaggtcaggagttcaagaccagcctctccaacatggtgaaaccccgtctctacaaaaaatacaaaaattagccgggcgtggtggtgtgcgcctgtaatcccagctactcgggaggccaaggcaggagaatcacttgaacctaggaggcagaggttgcagtgagctgagatcgtgccactgcactccagcctggatgacagagtgagactccatctcaaaataaatcagtaagtccattggtgcctctccctggagagaacccaggagggcttattgtggctgggccagccctgctgtcctcccaggaaacttcctctcagtatagttcccccacccgctcatttctcagggctcagatgtcacctcttccaggaagcctgccttgaacacccactcactctcaagcttggggtccggcctgagctccatggtcagggatcggggtggaaggtgaggacaggcgagaagctgcccaactgcagaaggtgcagcctgggtcccttcctgcctggctgaccccaggtgtcttcctccagcttcccaacctttgccccatgtggtaccttccacctgaaatctctctccagccctggcctgcccaggtcctcttttgagctcccctactccacttctccggagtcctggggcttctccactggggcgtggactccaccattccaccatgtatcctgtattatattatcgttattgtttgtagataccggggtctcactatgttgcccaggctggtgtctcttttttttttttttaattgagacaggatctcactctgttgcccaggctggagttcagtggcatgatcatagttcacctcagccttgacttctgggctcaagtgatcctcccacttcagccttctgagtagctgggactataggagcacaccaccacgcttggctaatttttgtatttttggtagagatggggctcttgccatgttaccgaggcttgtctcaaactcctgagctccagcaatccactcacctcagccttccaaagtgctaggattacaggtgtgagcgaccaagcccggtcatatattattattaatacaaacaaatgccatgctctgagcaccctggagtatgcgacatgtgatattcaataactccctagtcacaacaactgagaagagttgctttattatctttcttttccaggtgtgcaaacaagctcttggagggaaggagaggagaaaataaacaggtgaatatggtgggggtggggtaaagcaggcaatggaggaaggaggaggggactgaggctcagggagaagtatgtatgcatttgaaaagggaaagaggctggggcacagtggctcttgcctgtaatcccagcaccttggaaagcggaggcggaaggatcacttgagcctaagcgttccagaccagcctgggcaacatagcaagaccccacctctaccaaagtttttttttttgttttttttaattgagacagagtcttgctctgtcacccaggctggagtgcagcggcacgattttgactcactgcaacctccgcctcctgggttcaagtgattctcctgcctcagactctcgagtagctgggattacaggtgcgcaacaccatgcccagctaactttggtatttttagtagagaaggggtttcgccatattggccaggctggtctcgaactcctgacctcacgtgatccacctgcctcggcctcccaaagtgctgggattacaggcatgagccaccacaccctgcctaccaaagtttttttatttaaaacaaaaaaaaattagccgggcatggtggcaggcatctatagtcctagctcctctggaggctgaggtgagaggactgcttgagccctggagtcccaggctgcaatgagctgggatcatgacattccattctagcctgggcaacagagtgagactcccatctttaacgaaattttttttgatagagtctcactctgttgtccaggctggagtgcagtggcacgatctccacgcactgcaacctctgcctcctgggttcacgtaattctactccaggctaatttttgtgtttttagtagagatgggattttgccacgttggccaggctggtctcaaactcctgacctcaggtgatccacccgcctcagcctcccaaagtgctgggattacaggtgtgagccaccgcacccagcctctaacagatttttttaaaaaaagaaaagagaaggtcgggcatgctggctcacgcctgtaatcccagcactttgggaagccaaggctggtggatcacgaggtcaggagtttgagatcagtctggccaacattgtgaaacccccgtctctccaaaaaaaaaaatatatatatatataaattagccgggtgttgtgggcgcctgtaatcctagctactcgggaggctgaggcaggagaatcgaatgaaaccaggatgcagaagttgcagtgagccgagatcatgccattgcagtccagcccgggccacaatgcaagactccgtctcaaaaaaaaaaaaagaaaaagaaaaaagaaaagagaaacagtgtagcagagggaaggccaagtgcaaacgccaggagtctgaacttggagggacaggttcttccacacttgcaacagaggtctcctgcctccctgaccgccccgccccccgcgcccctgtctgtgtgaggaaatcaaatctcagcttgcctagggccctgtggcagggaggccccaacttcaccccatgggtcttgggtctgctgagctgagtcagagaaaggtttattatccccattttacagaggcttattgtccaaaggcgaagccacttgcccagagtacatgcggtgggccagcgactatgaaaacccctggggctgtcctctgttcagggatcgcccaggctccctgcccctgcgcgctgctgagactgggtcattttcggttctaccaggcaagcgggggacccagcccccactgctgctgccctcagccaaaaccagggctgcgccaccacccacccggcctatctcccatcttatctccccagctctgtcgcctgacccctgcaccccaccaaatcgcagcctttgcccggtgccctcaccgcctcggttggcccccgcgcgcgcctcgggcgaacccctggactggccctccaacagggccccagactcggggtacccagggtggccgctgaggcctggagaaatctgggcctcccctgtgcaccatccaactgcgcgccccagaggctcagggcgccccgggagtgtgggggtgtggacagatgagcagagccagagcatctcgggcagaagaggggacctgggagggggccggggagacagacagcgaacaggggtgaagccggggccggacggagcgcgcagcggacaatactgggttcaaaggggagagataaggcgcagactagaaacgctaggctggacccgggccaggcgcgccgcggggcagagatgggcggagcgggaacgggggcgggggcgagaatgggggggcggggacgggggcggggatggggtgcgggtgcggggtcgggggccagggagaggcctagttgcgtcgaggggggcaagcgcctggaggacccggcgcccgctccaggccctgcccctccaagtcccccgccccgcgccaggccccgcctctccagggccccagccccgcgccaggccccaccgttccggggcgcgtgccccgcccaggccccgcccccacggccccgccccgggctccccccactcaagccttttttcccctgctgggggccgaggcccggccaggagcagagtccggctgcctggggcgggcggcgcgtgtctgcagctgctccgggtagcccgctaggcgcgccgtccccagccccgccgccggccctcggtgcgcccggccgcctgcacccccaggtaagcgagcaccccgcgccgcgaacaccgccccgaacgccaccctcacggcggtccccggccccgcctccgcggccatggcggccccagcccggcccccactcgcagctgggctccagcccccatcaccccgccggggactgtccccctcggggcttcccatcatggccgtctccccgagctatccgcgctcccccacgagggccggggcgcaacgggtgcccgaggacgcggctgtgaaacgggctggagcgagtaggggcgatcctggcctcgtgacgcgggggaatccggatgtgtgagccgggggagcgccccgtttccccgacgtgccagggctggggacgcagctggggccctggcctcggagtccgcagcccggccgcgtagacggcttctgagaaccgcttaaacacgtcattccaagcccgagctaacccatcaggcggccggggtgaggtggaggtgcccaggcggggataatgtcatttggcctggttggaccagccagcgagggctttttaggcccagggcctagccgggagtgtgtgcggagcagaaaagaggccagcctggctgaaacgcggagagggagggtctgaggtggagagaggttggccggggcctgggaagcggcgaggagagtgtggaacccgttctcggggcggtggggaccagggaggcttggaacagcaggtgcatggcgtgatcggattgtgtcttaagaacatcccgtagccgctgtgggtaggagagatggggatacttggaagggggcttctggcttgacctggctggaaggtgtgataggaagtgggtgaactgaaaattcgctttggcagagtaacatcgtctaattctgtctgtttgcaagtggagcgtgggggaccgatgtttctcctgggtagttaggagtatatagaagaggctttcattgctgggttgggagacttgaggagaagctgctctgggggacacaggaaggtgggcagggggagaggctgttgtggtttgcaaaacctaccagatgggggaatgctcccatcgactccagtctgagctcaggcaaggtctcaggcatctgagcgcagaggccagggtgaccccactggggcgacctgggtctgttatatggggatagggttcctggactgtggaattgtctttgaagccctcggcctcccccagcctcaaatgggtctgccttccaggagcagctgctgtgaataaacacagaagtggagctgggggactgattagaagcctcattcagtgcacctgggccccagcaggcccagccaggcgtggaggaagaggcattgaggactttccttacctgtttttccagctcacccactgccagcagaggtactttgagcctggggtgtggggggtggggggcggccttggtcgttgaactggctgtagggcccccagggaaaggtttctgagcttcagtttacccatctgtaaaatgggtcagtagtatctgagcctgggagtgttcatggatcgatgaaagccgaggctaggcagatctcggtggcagccacacccctaaggaaccggagagggttctaacgcccggtgggagttcagggggatgtatgggcttccatttctcctctgagaaattcacaacagtgtccacctcctgacccagggctgtctgcaggttgaataaagcggttgacccagtgcgtggcacagaatgtcttggctcaggagccactgggatgcctgtagttggcagcagaagtgggcccaggttccctcctcccacccgtgggatggcacagaaaggcaggtgccttgggagctcgctgccctgtccccttctctgagcaccacaagcttctccctttccgactggctgggcttgagcctgaccaccccccagccctgtcctgccactttgagttgagggcctccgggctactgacttcaccacttcctgcttcagtttctccacctgtaaaatgggataatagcagtcatgacctataggtaaagagctgaacacagtgcctggctggttgtgaatacgtgctaaacaggctattaaaatatcacgagaatatcacagagctggaggctattaaaatatcacggaggggctgggcgtggtggctcacgcctgtaatcccagcactttgggaagctgaggcaggcagatcacctaaggtcaggagttcgagagcagcctggccaacatggtgaaaccccatctctactagaaatacaaaaattagccgggcgtggtggcatgtacctgtaatctcagctgcatgggagactgaggcaggagaatctcttgaacctgggaggcagaatttgcagtgagccgagatcgcgccactgcactccagcctgggcaacaaagtgagactatctccaaaaaaaaaaaaaaaaaaaaaaattcagagtcatgcctggggtcagggggagtccagaggagtcacctgactcagcctaaggaggagtcagggaaggcctcctggaggaggtgacagttggctgggtcgctaagggtaaggaggagttaaccaggccaagagaccagtgggcaaattgcagaggagagaaactgccagggtgcttggatgaaacaaccacaaagccagggttgtaagatccagaagaggggagaggaagaagggcagagccagcctgccagccttgaacaagcatttggcattatttagagctcagggaacagactgcaggggtcgaaggcaggagcctggagaccaggatggaagggactgcaccaggccaggggagtaatggtggggctggaccaggtgaaggcgtggacgggtgagacttgggtggatcttggagagatatggagaggccgggggagggagcagctgctcatgggggagaagctttaggtgtaagtcagcaatctgttctcagcatctggaaattgccatgctgctagacacccaggtggtacggcgtaggatgggctttaaagcaagctgggagcttgggagacagcagaaagagggcagaaggaaaaccaggagtgggtggcaagctgggagccaagggagctggggctgtcataggaggaaagggtcttgaaacccctgtttgataattcagtagcaggcatcttactgtttttttaattattattttttttattttttggaatggagtttcgttcttgtcgcccaggctggagtgcaatggtgcgatctcggcccactgcaacctccacctcccgggttcaagcaattctcctgcctcagcctcctgagtagctgggattacaggtgcgaaccaccacacctggctaatttttatattattagtagagatgaaggggggtgggtttcaccatgttggccaggctggtctcgaactcctgacctcaggtgatgcacctgcctcggcctcccaaagtgctgggattacaggtgtgagccactgcgcccagcccgtctcactttcttttgtggctgctctttaccaaccctgttctgttccccatgcctttcagtacaagctcttttctttgcttttctttcttgtttttgttttgttttttcaagacaagttctggctctgttgcccaggctggggtgcagtggtgcgatcttcgcccactgcaacctccacctcccaagtttaagcaatcagcctgggactacaggcataagccaccacacctggctaatttttgcatttttttgtagtgattttgtagagttttgccagttgcccaggctggtctgaaactattgagctcaaacgcctcagcctcctaaagtactgggattacaggcatgagccactgcactcggcctctttctttctttcaaaggcagaatcttgctctgtcgctcaggttggagtgcagtggcatgatcataactcactgcagcctcgacctcctgagctcaacctcagcctcctgagagctgggaccacaggcatgcaccaccaggcctagctaatccttaaaaaaaaattttatacacatggacaggggtcttactatgttgcccgggctggtcttgaactcctggcctcaagcgagcctccagcctcaacctcccaaagcactaggattataggcatgagccactgtgcctggccaagcgcaggcttttctttgccatccttgaataggcccctcagacccatcatggctctgaccagagtagcatagagaggcccggcgcggtggctcacgcctgtaatcccagcactttgagaggccgaggcgggcagatcacctgaggtcaggagttcgagaccagcctggccaatatagtgaaaccccgtctctactaaaaatataaaaattaaccctgtgtggtggcatgctcctgtaatcccagctacttgggaggttgagacaggagaattgcttgaacccaggaggcagaggttgcagtgagccaagatcgcactactgcactactgcactccagcctgggtgacagagcaagacactgtctcaaaaacaaacaaacaaaaaacagagtagcatagaagagaccttcccctccctgagtctggactttatacctttgttaataggatgctgtcacacacacacacactgaaccgcctggagctcagctcagctttccctccctaccccctcctggactcccagagacagattttaatccagggtcccatgacactgtgtctgaagagtgatcatttcctatcagctatgccctggggaccccttctgccctgtgcctggccccactttcctcccacccctgtctgtctgtctgtctgtcatttgttcattcagcacagacttaggaagtgtctgcagtgggaggcactggggacagacagccacaggaagccttacggagctgatgtccccgcagggagaaggtgatggggacaaggatgaggcttgaaggagcagctagacatctggaggaagagtgctccgggcagaaggcccagcaggtgcaaaggccctgaggctggaacaggcatggtgtgttggaggaatgcaatgaggctggggtggctggagcaaactaagcaaggagtcatagagtagagagaggagtagatgaagagactgaaggtccttgggaacccccagtccaaccacagcataccctggagagtccttgctcaaggggacttgaggagtgaaaggttatgggaccctactgcttttgcacggttactttgtcgtcctgtatgtgcagtggtcacctgtgctggggtgctcgaaccttgaaggctgaggaagctggcaggaggaaggagaggaggactacgcagtggccaagacttctcctcctcccctccacacaatggggctcagctgaactgggagagggaagtagccagggaagggtactgatgagcgtatggaagcagaggagatgaagggcagtggggaggaggtgggaggggaggaggaagaggaaagggaggaagacgagggggaggagagggaggagggggaggaggagaaaaaggaagaggagggggaggagagggaggaggaggaggagaaaaaggaagaggagggggaggacgaggaggaagaagcaacggcagcagccagtgggcaagcagccagagctggatggaggagccaggacgttctcagataggtgatgggggagccctagggatgcagggatggtagcctcgatcaggggcctagaggacaaacagcaaaagccaagcagcagggccaggcgcggtggctcacacctgtgatcccagcactttgggaggccgatgtgggtggatcgcctgaggtcaagagttcgagaccagcgtggccaacatggcgaaaccctgtctctactaaaaatacaaaaattagccaggtgcagcggtgtgtgcctgtagtcccagctactcaggaggctgaggcaggagaattgcttgaaccaggggggcggaggttgcagtgagcagagatcacaccactgcactccagcctgtgcaacagagcaagactctgtctcaaaaaaaaaaaaacaaaaaacaagcagcgggtgtgtctgggggatgggccagcctctagcctgcagtcgctcccttcccaggcaaaagagagagaactcggtcccctctccctgtaccccacaagagcctgggcaccctccccactcccaccacgaacctgggcttcactgggagggaatttagacacttggatgctggagcctagatctgaggttctgttgagccacggcactgtgacccggactgtcccctccatccccgtccaaactgggagggggcatcccttgtccctggcactcctctgtgatctggcaggtgtgatgagccacagcagggacaggggaataggggctgggctttttagggtgatggcacccagacggtaacaggacgggagggaggtggtcctctgggttttgtttctccatctgggatgttggtgagggcaggcataagccacctctctgtgcctcgagtccaggatgcctggccctgcctcagggcctttgcactggctcttccccctttctagaatgttctatcatcagggtttcctccctcacctccctaccttctcagggagggcttcctgacctccctctttaaaattgtagccctgccaggcaccgtggctcacacctgtaatcccagcactttgggagcctgaggtgggcagatcacctgaggccaggagttcaagaccagcctggccaacaaggtgaaaccccgtctctactaaaaatgcaaagattagccaggcgtggtggtgggcgcctgtaatcccagctgcttgggaggctgaggcaggagaatcacttgaacctgggagatggaggttgcagtgagctgagatggtggcactgcattccagcctgggcgacagagagagattttgtcttggaaaaaaaaaaaaaaagaaaattacagcccccactgcctgactcctcattccttttcctgccttatttttctctccacctgacaataacaaaacaaacaaattatcaaaatgcagggccagatcaggtggctcatgcctgtaatcccagcactttgagaggcaagttgggcagatcacttgagcccaggagttcaagaccagcctgggcaacatagcaagaccccatttctgaaaaaaaattaagatatagagtctttgccactccctcatctccaccatgtccagaatattggctccatggagtgaaatttcttgtctactctgttctctgctgggatcccagtgtgtagttggtatgcagtgggcacccgataaatgtgaagtgatgtcagccatcctgggtccttatggctgcagcctgagaggttggacttggggggcggatggcgttgggggtagcgtacctcgggtggcaggtaacaggcaggttctggagacaggcaggcttgggtccaagtcccagactctactccctactttatgactttggatgactccatgcctcactttccccagttgcaaagtacagatgacagagggacctggcacttaacacatgtcagcttcccggggaccttgctggagtctggaaggagctgggggccaatctgaggcctccagagggtcagactctgagacaggacatttatgactttcccacccactcctagaattttccagaaatgtgatgaagagcaaggagacgttactttattttgggcagtcaggacccctctgaaaaggcgacattagggctggggcctgagtgggagtgagtgatgggctgagacaggaattggacttgtttactgccctcccagagacccctcattcagtggggagacagacgtgtctttgggcagttacaaggcagattaaccagggtacaaggaaaacaatcagagacactgaaggcaaggagaggctcgttttttaatttttttttgagacagagtctcgctctgtcgctcaggctggagtgcagtggcgcaatctcggttcactgcaatctccgcctcccgagttcaagcgatcctcctgcatcagcttcctgagtagctgggattacaggtgtccactaccacacctggctaatgtttttttttttttttttgagatggagtctcgctctttcacccaggctggagtgcagtgactccatctcggctcactgcaagctccgcctcccgggttcatgtcattctcctgcctcagcctccccagtagctgggactacaggtgcccaccaccacgcctggctattttttttgtatttttagtagagacggggtttcaccctgttagccaggatggtctcgatctcctgacctcgtgatccgcccgcctcggcctcccaaagtgttgggattacaggcgtgagccaccgcacctggctaatttttgtattcttttgtagagacggggttttgccatgctggccagactggtctcgaactcctgatctcaagtgatctgcccgcctcatcctcccaaagtgctgggatctacatttggccttctttttgtttttgcttttattttgagacagagtctcactctgtcgcccaggttggagtgcagtggtgcaatcttggctcactgcaacctttgcctcccgggttcaagcgattctactgcctcagcctcccaagtaactgggattacaggcacgtgccaccatacccagctaatttttgtatttttagtagagatgaggtttcaccatattggccaggctggtcttgaactcctgacctcaggtgatctgcccaccttggcctcccaaagcactgggattacaggtatgagccactgtgcatgaccaaggagaggctcttgacccaggctgggagtcttcaagacttcctggaggcagccacaggcaagctgcccacttgaaggtttaaccatgccaggcatcagataacggaatgctgaacagtgatttagagggagcggcccaggcaaaggcctggcatccgggaatggcatcggagcaacattcctaaaattgaagcagactctgggaatccacccgtggagaccctaggctgagaacctcggagtcagggtggctgcgggagggcagacagggaggccaggacagggcagtgcgttcggccaggtcacaaaggcctcgaatgccaggtcaggagccatggggagcctccgaggagatcttgagatggggaagggacaggctggtactcagagccactgctgagagagggatggactccatctgtgtgtatcccagaggaggggcggtcctggaccgtcatctgagaggaagtgctttgcctccagttacacaaacacctccggtccttaaagggacgataggtagcctctgcctccccactgggggcccttctctgtgccaacccatccaacccagagggctgatggaagacgtgtgctctgcaggggctctctgtggcttcttgcttcactgggtggatgggtatcaagatggtgacttgaggccgggagccgtggctcatgcctgtaatcccagcactttgggaggccgaggcgggaggatcacttgaggccaggagttcgagaccagcctggccaacgtggtaaaaccccatctctactaaaaatacaaaaattagctgggcatggtggcgggcgcctgtattcccagcgacttgggaggctgaggcaggagaatcacttgaacccaggaggcggaggttgccgtgagcctagatcgtgccattgtactctagcctgggtgacagagcgagacttcatctcccgcaaaaaaaggtggtgacttgatttcacagagaactccagctgcctgagccaccctgcaggataggagcaggctctgaggtccacagtttgctactgtctcaacccactgcccccagctcctctgagacccaggcaggactgcaggcccatgtaggttcagatggatgcctggaggccggacacggtggcttgcacctgtcatcccaacactttgagaggctgaggctcaagtatggcttgaggccaggagttcgagacaagcctgggcaacatagtaagaccctatctctataaaaaatatatattttaaaattagctgggtgagggctgggcacagtggcttatgcctgtaatcccagcactctgggaggccaaggcggatggatcacctgaggtcaggagtttgagaccagcctgaccaacatggtgaaatcccgtctctactaaaaatacaaaaaaattagccaggtgtggtggcacatacctgtaactccagctactcaggaggctgaggcagaaaaatcgcttgaacccgggaggtggaggttgcaatgagctaagactgtgcttctgcactccagcctgggcaacaagagcgaaactctgtttcaaaaaaaaaaaattagctgggtatagtggcatgggtgcctgtagtctcagctattcaggaggctgaggcagggggatcatttgaacccaagagtttgaggctgcagtgagctatgatcatgccactgcactccagcctgggcaacagagtggaatcctgttgtctcttaaaaaaaaaaaatttgttaagtggatacatacctggggaccctggagctccacggctgctgccctcaccctgttgttttcctccctctcggatgatgccatcttagaattccatgcctggaatttgcccaccggctctcctcgccccctcccacccctcggctgtgtgtccccttattcctgcccaagcaggcagttcccagatctaccccagatactcatcccaatctgccacccccaccccttgaagataccctacccggacctcagcacccctccccgaggctcctgtctctgccaccctccaccttcagcctccctctctcttcttttctggagacagcaccatgctctgttacccaggctggagtgcagtggtgcgatctcggctcactacaatctccacctcgcaggttcaagtgattctcttgcctcagcctcctgagcagctgggattacaggcatgtgccaccatgcccaggtaatttttatatttttagtagaaatggggtttcaccatgttggccaggctgatctggaactcctggcctcaggtgatctgcccgcctcggcctcccaaagtactgggaatacaggcatgagccaccgcgtccggctgagcctccctacctgttctgacccagcttccccactctggctgctgtcacctgcaagaggccagccagcctctgagtgacctccagggatgggacaacctccaagggcagcctgtgttgccaggagaactcccagaatcggtccctcccgaaatctctgccgccttcccatggcatcaaggctgagggcttctgttaccactgctgttttgtgtttttttttttgttttttttttgagacggagtctcgctctgtcacccgggctggagtacagtggtgcaacctcggctcactgcaagctctgcctcctgggttcatgccgttctcctgcctcagcctcccgagtagctgggactataggcgcccgccacggtgcctggctaatttttttgtattttttttagtagagacggggtttcaccctgttagccaggatggtctcgatctcctgaccttgtgatctgcccgcctcggcctcccaaagtgctgggattacaggcgtgagccactgtgcccggcctgtgtatttttttttttttttttaaacagagacagggtctcgctatgttgctcaggctggtcttgaactgctaggctcaagcaatcctcccaccccagcctcccaaagtattggaattacaggtgtgagccactgtacctggttctgctgctgtgtccttcaaggcatggtaacagacacttggtaacctccccttgaatctggagtgcccgagggcctgggctggcagccttgccaacatcgggaactggtcaagactgcactttgttttgtgttcattgtatttgttttcacggctagcctctgcacgtgatgccaatgctggcttgctctttcagggagagagggagggagagaaagtgtcttctgaaaataaatgtatttcggtaaacaaacaatgtgagccttttaacttttttttttcttattttttttttttgagacggaatcttgctctgtcacccatgctggagtgcagtggcacgatcttggctcactgtaacctccacctcccaggttcaagcgattctcctgcctcggcctcccaagtagctgggattaccatgcccagctaatttttttgtattattagtagagacgaggcttcaccatgctgaggtcgaactcatgacctcaagtgatccgccctcctcagcctaccaaagtgctgggattacaggcatgagccaccacacccagcctaaaattttattttatatttacttactgacttatttatttttttatgtttttttttttttttttttttttttttgagacagaggcttgctctgtcgcccaggctggagtgcagtggcatgatcgtggctcactgcaagctccgcctcccgggttcacgccattctcctgcctcagcctcccagtagctgggactacaggtgcctgccatcacgcccagctaattttttgtatttttagtagagacggggtttcaccgtattagcaaggatggtctcaatctcctgatctcgtgatccacccgcctcagcctcccaaagtgctgggattacaggcgtaagccaccgcgcccggccctatttatttttttttgagatggagtctcgctctgtcacccagactggagtgcagtggcgcaatctcggatcactgcaacctcggcctcccgggttcaaacgattctcctgtctcagcctcctgagtagctgggattacaggcacccaccatcatgcccagctaatttttgtatttttttgtagagatggggtttcaccatgttggccaggctggtcttgaactcctgacctcaggtgatcctcttgcttcagcctccgagaagtgctgggattacaggcgtgagtcactgtgcctggccagcatgagccttttttatttatttatttttgtttttgagacggagttttgctcttgttgcccaggctagagtacaatggtgtgatcttggctcacggcaacctccgcctcctgggttcaagcaattctcctgcttcagcctcccgagtagctgggattacaggcatgcgccaccacacctggctaattttgtatttttggtagagacggggtttctccatgttggtcaggcggatcttgaactcctgacctcagatgatccacccgcctcggcctcccaaaatgctgagattacaggtgtcagccactgtgcctggccagcacgagccttttgaaggagagcagtgagtgcctcacagcacaggtggaagacggacaggtggccatgagggtggtgggaaagcctgaaactggagcttggttgttctctggaatcctgggtgcccggtctcagttgagccttttactcatttgtgcagtcggtggacagtttcctgctacccgttgtgtgtcaggtgctgggaaaatggagaggtcctaatcaccaggatatgggggaagatagttgtccctggctgggtgcagtggctcacatctatagtcccagcactttgggaggttgaggtgggaggatcacttgaggccaggagtttgagaccagcctgggcaacatagggaaaccctgtctctgccaaaaaaaaaaattagctgggcatggcggcatgtacctgtaatcccagcactttgggatcctgttgaggcatcaggatcacttgaacccaggagtttgagactagcctgggaaacatagtgagacctggtctctacaaaaaaattttcttttttaattggccgggccgggtgcagtggttcatgcctgtaatcccagcactttgggaggctgagaggtgggaggatcacttgagctcaggagtccaagaccagcctgaccaacatgttgaaaccctgtctctactaaaaaaatacaaaagtagctgggcatggttgcacacgcctgtaatcccagctacttgtgagactgaggcaggagaatcacttgaacctgggaggcggaggttgcagggagctaagattgcaccattgtgctccagcctaggcaacaagagagaaactctgtctaaaaaaacaaagacaaaattagccgggcgtggcagtgcacgcctataatcccagctactcagaaagctgaggtgggaggatcacttgagcctgggaggtcgaaactgcagtgaaccttgatcatgccactgcactccagcctgggcaacaaagcaagaccctgtctcaaaaacaaaaacacaaaaaacagttgcccgtggctgggtgcagtggctcatgcctgtaatcccagcactttgggagaccgaggcgggcggatcatttgaaatcaggagttcgagaccagcctgaccaacatggtaaaaccccgtctctactaaaaatacaaaaaaaattagccgggcatcatggtgcgtgtctgtagtcccagatacttgggaggctgaggcaggagaattgcttgaacctgggaggtggagggtgcagtgagctgagatcacaccactgcactccatccagcctgggtgacagcaagactccgtctttaaaaaaaaaaaaaaaaaaaaaaggccaggcacggtggcccatgcctgtaatcccagcactttgggaggccaaggcgggcggatcacgaggtcaggggttcgagaccagcctgaccaacatggtgaaaccctgtctctactaaaaatacaataattagccgggtgtggtggcacgcgcttgtaatcccagctactcaggaggctgaggcaggagaatcgcttgaacctgggaggcggagattgcggtgagtagagattgtgccactgcactccagcctgggtgacagagcgagactccatcgcaaaaaaaaaaaaaaaaaaattgttgccccaaaagttctgagaaagatgaggtaggagaacccaggaggggagtgtcccctaacccagcccagcggcgattggtcggccctcctagaggaagtgtctgttgaacagagtcgtgaagagctgggaggaatttggcaggctgaagggagggcattactggtagggaatggcatgtgccaaggtccatttgctggggagcaccgtgccaggccagtgggagcacttgcaggattcaaagctgcgggtctgatttgcaggcaagaagaaagacctgggtgctgagtggggaggcggccaccatgattcaatcaagaaatgggagccgtggaaatcgggcagaggagggactgtcgcgggaaagacggacgtaatcgtagggcttaatgaggagctgagtgccgagagggtgtgagatggagtcagagatgactctcagaattttgtccctgaagactgggtggagggtgggatcttggccaagaagccaggggaggaggaaagaaggctctgtgggagatgacttcagccctgacgtgtctggacagcgcgcagacgggaggtattggggcagcaggtttggctttggcgggatggtgacctgggagcagcagaaatctggaaactgacagcatggacgtgctggccgcagcttccaggcaggtgaatttcccagggagagcagatggtgtgaggggatccaggactggcataatttagggagaaaaaccagcacaaattagagaaaacagcagagaggaggggaaccaggaggtcatgattctgggaaggagggatggacaaggggaggagatgctactagagggtcccagtttcatgcttagaggaattgaccacttgggattggccatgggaggctgcgactgatggccaaaagccaaaggctggagtagtagggtggggacagagaggtggcagtggacagtgaatagaagcaggaaggcaagtcctgttttccaataattcttttttttttttttttttttgagacaaagtctcactcttggccccccaggctggagtgcgcaatggagcgatctcggctaactgcaacctccgcctcccgggttcaagcgattctcctgcctcagcctctcgagtggctgggattacaggtgcccgccaccaagcccagctaatttttgtatttttagtagagatggggtttctccatgttggccaggctggtctcgaactcctgacctcaggtgatccacccacctccgcctcccaaagtgctgggattataggcgtgagccaccgtacccggccgtgttttctgataattctgaggctactgctgatgagctgagtgtctctgggcccatgtctgtctggaatgcctggtgccacagagctggggtcaaattactgcctggccatttgtcagctatgtgaccctgtgtaggtgatccggcatgtctccaagactcagtttgttcatctgtgaaatgagaatggtgaccgggcaaggtgactcacgcctgtaattccagcactttgggaggccaaggcgggcggatcatttaagtacaggagttcaagaccagcttggccaacatggtgaaactccgtctctactaaaaaatgcaaaaattagccaggtgtggtggcgcatgcttataatcccagctacttgggaggctgagacgggagaatcgcttgaatccgggaggcagaggttgcagtgagccgaagtcacaccactgcactccactccagcctgagtgacagagcaagactctgtcttaaaaaaaaagaatggtaacagtatcttcctcagggtgtgactgatatttccaatgcagggaggtaagggcttgtccctgggtaagcgtctgatggataatacctgggatggtaccaacgctattggtcactggtgccttaggataatcctggtgtgggtgtgggcaaaagcctgctctcccacagaacagtctggctttgcacctgcttggccctatatgaatctacctccatgtatgctgtcaccagggagcagcacaggggcccagccaacagctggtgggaggaggggcagatgttagagcaggttgagtgaaggaaggatcccatcagagcataacccagatttcacaattatctccaccctggaaggtgggcagggacatcaccaaaggggctgatcttgatggaaaattggtttcttggcccgtgtagtggctcatgcctgtaatcccagcactttggaaggccgacgtgggcagattgcttgagcaaaagagttcaagaccagactgggcacagtggctcacgcctgtaatcctagcactttgggaggctgaggcaggcggattgcctgaggtcaagagttcgagaccagcctggccaacatgctgaaaccccgtctctactaaaaacacaaaaattaggccaggcgcagtggctcacacctgtaatcccagcactttgggaggccgaggcagacggatcacctgaggtcaggagttcgagaccagcctgaccaacatggagaaaccctgtctctactaaaaatacaaaatcaactggatgtggtggtgcatgcctgtagtcccagctacttgggatgctgaggcaggagaattgcttaaacctgggaggttgatgttgccgtgagccaagattgcaccattgcactccagcctgggcaacaagagcgaaactgtctcaaaaaaaagagaattggtttcttaagtagtgaggtgggggtagagggctcattccctaccaaaaatgccccctctcctgtatcaaccctgtctcctgtatcaaacacaccttcagtggaaatcttttcattttcatgtactataattttctatttaaaaagtcacccttaatatatatacatacactggaatatgattcaggttttttttcttctttttccttgagacagagtctcactctgtcacccaggctggagtgcagtggtgcgatctcggctcactgcaacctctgccttgatcttggctcaagcaattctcatgcctcagccttccaagtatctgggacttacttggaagtaagctggccaccacgcctagctaatttttgcatttttagtggagatggggtttcaccatgttgcccaggctggtctcgaactcctgatcgcaaatgatccacccgtctcagcctcccaaagtgctcggcttacaggcatgagtcactgcacccagcctgattcagccttaaaagggaaggatgtaacatgtcatgtgggtgaaccttgaggacattatggtacatgaaatcagccagtcacaaaaggggagatactgtgtgattccacttacatgaggcccctagcgtcaccagattcacacagagagaaagtagaatggtgggtgccaaaggagagggaacagggaattattgattattaggcatggattttcaggtttttgttgctgttgttttgagacggagtctcactatgttgctgggctggaatgcagtggcgtgatctcggctcaccgcaacctctgcctcctgggttcaagcgattctcctacctcagcctcccgagtagctgggattacaggcgcccgccaccacgcccagacaatttttgtatttttagtagagacggggtttcaccatgttggccaggatggtctcgatctcttgacctcatgatccgtccatttcggcctcccaaagtgctgagatgacaggtgtgagctactgtgccctgccagagtctcacgatccgtccgcctcggcctcccaaagtgccgagatgacaggtgtgagccaacgtgccctgccagagtttcagttttacaacatgaaagaattctggagctggatggtggttatggttacacaaccatgtgaaatatttaatgccactgaactgtataattaaacacgattaatggtaaatgttgagtattttaccacaattaaaaaaaatttttaaatatgtcagccgagcatggtggctcacacctataatcccagcactttgggaggcctaagtgggcagatcacctgaggccagtagtttgagaccagcctggccagcatggcgaaaccccatctctactaaaaatataaaaaattagctgggtgtggtgtaggtgcctgtaatcccagctacgcagcaggctgaggcaggagaattgcttgaacctgggaggcggaggttgcagtgagctgagatcccgccgttgcactgcagcctgggcaacaagagcaaaactccgtctcaaaaaaaaaattttttttttaagaagtcacccttaaacccactccttataaaaaaaaatcagtgaaggccgatcatggtggctcatgcctgtaatcccagcactttgggaagccaaggtgagaggatcacttgagatcaggagttcaagactagcctggccaacatggtgaaaccttgtctctcctaaaaatacagaaattagctgggcataggggcacatgcctgtaatcccagctacttgggaggctgaggcaggagaatcacttgaacccctggggcggaggttgcaatgagcagagattgcgccattgcacacaccagcctgggccggtgagacttcatctaaaaaaaaaaaaaaatccatgaatgccaggtgtggtggctcatgcctgtaatcctagtactttgggaggctgaggcaggcggatcccctgagtccaagagtttgagaccagcctggcaacatggtgaaaccccatctctacaaaaaattaaaacagtagctaggcaaggtagtgcacacctgtaatcccagctacttggggagctgagctgggagtatcacctgagcccaggaagtggaggctgcagtgagctatgatcagtaaaacacaagacaggttcactggctcccatcccaacccggaccagctccctagtataacaactcacatgcatgtggactatacccttagagccttcttcttctttcttcttttttcttcttcttctttcttcttttttcttcttcttcttcttcgtgtgtcgctctcacccaggctggagttcagtgcgatcccagctcactgcaacctccgtctcctgggttcaagtgattctcctgcctcatcctctggagtagctgggatgacaggtgcctgccaccacgcccagctatttttttgtatttttagtagagacagggtttcaccatgttggccaggctggtctcgaaatcctgaccttaggtgatctgctgcctgccttggcctcccaaagtgctaggattacaggtgtgagccaacatgcccagccttttttgttttttgagaaagggtctcactctgtcagacaggctggaatgcagtggcatgttcaggactcactatagcctcaacctcccaagctcaagtgatcctcctgcctcagcccctaaagtagctgggactacaggcatgtgccaacacacccagctagttgttatttgctgttgttgttgttttaattttagtagagacaaggtctcactgtgtttcccaggctggcctcgaactcctgagctcaagtgatcttcccgcctcagcctcccaaagtgctggggttacaggtgtgagccaccacatctggccttacagccttcttctgtgtgtttatgtgcatatatgtagccatagggaaaaaaatcaaaatcctttggtgttctttcttattttttcaaatatttcacctgccccattctctttcctttctccttctagtactcccattgcatgcaagttagacctttttttttctttttttttcttttttttgagacggagtctcgcctgagctggagcacagtggtgcgatctcagatctcggctcactccagcctctgcctcccaggttcacatgattctcctgcctcagcctcccgagtagctgggattacaggcatgtgccaccacgcctggccaatttttgtatttttattagagagagggtttcatcatgttggccaggctggtttcaaactcctggacccaagtgatccgcccaattcagcctcctaaagtgctgggattacaggcgggagccactgtgcccagccataagttagatcttttgatatcatccagaaaataccaaggctctatacagtttctaaattgaggtaaaatatatgtaatataaaattaaccattttaaacatgtttaagtgtgcaacttagtagtattcagtacattcaaagtgttgtgcaaccattaccactatccatttttacttaaacttttttcttctctgttcttcagtttggatatttgctatcaatctgtctttaaatttgttagcactttcttttatcatctccaatgcgctatcaagcccaaacagtgaatttttaaatttcagattgtgtatatttttaagttttataatttccatttgttttttgttttgtttgtttgtttgtttttgagacagggtctcactctgttgcccaggctggaatgcagtggtgcaatcacagctcactgcagcctcaacctcttgggctcaagtgatcctcttgcctcagccccccaagtagctgggactacaggcttatgccaccacgctcagctaatttttgtattttttgtagagacggtgtttcaccatgttgcccagctgctcttgaacccctgaactctagtgatccacccaccttggcgtctcaaagtgctgggattacagacataatagctgcctcaaacacctttctgctaattccaacatctgggtcacctcagagccagtctcctttaacttccttctttcctgagcatgggccatgttttccaattttgtgagatgtcaagaaattttggattgagtgctggatattgtggaagatatgttgtagagtctctggattctgttatgttcctttgaagagcaatgattttttaaaatttaactatttttttatcaggcagttaacctggctggactcagactccaaagtctgtttctcctgtggtgggtagcagatgaaatcttggcctagttctgttagcctcagcaaggctagttggaatacgttcaatatccatgggctaagagtcagcaagagatgtacacagacttttaatgtagaatatggggctttccatctctggctcttttcttttctttttcttttttgagatggagtcttgctctgtcgcccaggctggagtgcagtggtgtgatctcggttcactgcaagctccacctcctgggttcacaccattctcctgcctcagcctcccgagtagctgggattacagatgcccgccaccatgcccggctaattttctttttgtatttttagtaaagacagggtttcatcgtgttagccaggatggtctcgatttcctgacctcgtgatccgcctgccttggcctcccaaagttctgggattacaagcatgaggcactgtgcccagcattttttttttttttttttttttagagacagtctcccaggctggagtgcagtggtgcaatcatagcttctgggctcaaaggatcctcccacctcagcctcctgagtagctgggactacaggcatgtaccacctcacccagctttttcttttttttttttggtagagacagggtctcactatcttgccaaagctggtctcaaactcctagcctcaagtaatcctcccacctcagcctcccgaagcagtggaattataggcatgagttacgacacccggccctatcctcttaatctttaagccagtttttatctccaatgaatagcaataaaaatgagaaattcacccagtgccatttctttcttccatttatagattcccttccgattgctacttgtttttcctctttagagtgatactgtccagtagaattttatttcttttttcttttcttttttttaagacagaatcttgctctgtcacccaggctggaatacagtggtgcaatctcggctcgctgcaacctctgccttccaggtttaagcgattctcctgcctcagcctccctagtagctgggattacaggcacgtgccaccacacccggcaatttttttgtatttttagtagagacggggtttctccatgttggtcaggctgatctcgaactcccgacctcagatgatctgcccacctcggcctcccaaagtgctgggattataggcatgagccactgtgcccggcctagaattttctacaatgatggaaatgttccatatctgaattctgcaaagtggtagccactggctacatgtggctattgagtatacaaatgttgttagtgcaacatatttattaaaacctttttatttaaacctttttttttttttttgagacacggtctcaccctgttgcccaggttagagtgctggtggtgtgatcacagctccctgcagcctagatctcccaggcttgtcatccttccacctcagcctcctagagagtagctaggactacagggagacaccaccatgcctcgctgattttttttttttttttttttttttttgaagtggaggtgaggtttcactatgttgtccaggctggtcttaaactcctaggcttgagtgatcctcccgccttgacttcccaaagtgctggggttacagacataagccactgcagccagcctgaatctttttattttattttttttaagagatgagggtctctctatgttgtccagcctggtctcaaattcctggcctcaagcaatcctccaacttcagcctgggattacaggcaaaagccaccacactcggctaatttttttttggggggcggagtcttgctctgtcacccaggctggagtgcagtgctgtgatcttagctcactgcaacttccgcctcccaggttcaagcgattctcctgcctcagcctcccgagtagctgggatcacaggcacgtaccaccacacccagctaattttttgtatttttagtagagacggggtttcaccatgttggccaggctggtctcaaactcctgacctcaggtgatccgcctgcctcggcctcccagagtgctgggattacaggtgtgagccaccgtgcctggcccaggtagttgtttttttatatttagctcagtgtttatcattgttatctatgaaagagctggcctgatgtggctgacttcaccattaccagaaggagaattcttgtggttttccattgtataaattatcaggccattagtgtctctctgtactttgcttttattttttttaactccataatcctcccaagccattgaacatagctcttcctccaccccatacctcctttagtaatttttaaaattaaaaaattttttaattgtggggccgggcgcggtggctcacgtctgtaatcccagcactttgggaggccatagcaggtggatcgcttgattccaagagtttgagaccaacccgggtgacatggcgaaatcctgtctctacaaacaaacaaaaacacaaaaattagctgggcatggtggcacacgcctgtagtcccagctgctcaggaggctgaagtgggaggaccacttgagcctgggtggtgaaggttgcagttagatagcaccactgcactccagcctgagcaacagagacctcgtctcaaaataagagagtcggctgggcgtggtggctcacgcctgtaatcccagcactttgggaggccgaggcgggcggatcacgaggtcaggagatcgagaccatcctggctaacacggtgaaaccccgtctctactaaaaatacaaaaaattagccgggcatggtggcaggtgcctgtagtcccagctactcgggaggctgaggcaggagaatggcgtgaacccaggaggcagagcttgcagtgaactgagattgcgccactgcactccagcctgggcgacagagtgagactccatctcaaaaaaataaataagacagtctccctctgtctccaaggttggagtacagtagtgcagtcatagctcactgcagcctccaacgcctgggctcatgcagtcctcccgagtagctgcaccacaggcatgagccacagcccccagcttccagaacctttttgttttccaaaactgaaatgctgtactttacccattcaattttaactccccatttcccttcccctggcacccaccattctattttttttttttttttttttttttttttggagacagagtcttgctctatcccccaggcaggagtgcagtggcttgatctaaactcactgcaacttctgcttcccgggttcaagcaattctcctgccttagcctctcaagtagctaggattacaggcacgcatcactatgcccagctaatttttgcatttttagtagaggtggggtttcaccttgttagccaggctggtctcgaactcctgacctcaggtgatccacctgcctcggcttctcatagtgctgggattacaggcatgagccaccacgcccggccccattctactttctgtcactatgaatgggactattctagagacctcatataagtggaatcatacaggatttgtcctcttgtgacaggtttatttcattcagcataacgtcctcaagatttatccatattgtatctttctctttttctttctttctttcttttttttttttttcagacagagtttcactcttgttgcccagactggagtgcaatggcaggatctcggctcactgcaacctctgcctcctgggttcaagcaattctcctgactcagcctcccgagtagctgggattacaggcacacaccaccatgcctggctaatttttgtatttttagtagaaacggggtttcaccatgttggccaagatggtcttgatctcctgacctcgtgatctgcccccctcagcctcccaaagtgctgggattacaggcgtgaacgaccgcacctggcataatagggacgaggtttcactatgttggtcaggctagtctcaaactcctgacctcaggtgatccacctgcctcggccttccaatgtgctgggattacagggccatctttttgcttttttttccccatttgctgttttaaaacttctagttcaggccgggcatggtggctaatgcctataatcccagcactttgggaggccgagggaggtggatctcctgaggtcaggagttcgagaccagcctggccatcatagggaaaccctgtcaaaaaataaataaaaaatacaacttctagttcaggctgggtgtggtggctcatgcctataatcccagcactttgggatgccgaggtgggaggattgcttgaacctaggagtttgagactagcccaggcaacatagtgagaccctccccccaatctctataaagaattttaaaattaggcaggctggtggcatgtgtctgtggttccagctactcaggaggctgaggtgggaggatcacctgagccccaggtgggttgaggctgcaatgagctgtgatcgtgccactgtagtccagcctgggtaacaagagcaagaccctatcccaaaacaaaaacaaaacaggccgggcgcggtggctcacgcctgtaatcccagcactttgggaagccgaggcgggcagatcacgaggtcaggagatcaagaccatcctggctaacacggtgaaaccccgtctctaccaaaaatacaaaaaaattagctgggcatggtggcgggcacctgtagtcccagctactccgggggctgaggcaggagaatggggtaaaccgggaggcggagcttgcagtgagccgagatcgcgccactgcactccggcctgggtgacagagtgagactctgtctcaaaacaaacaaaaaaatgccttctagttgaaaaggttttacatgtcctatttcatgacttgtcatttggtgtaccagagttttgttagttcaaatcgagaaagacgtttcctaacatgacatatgcgttagtaaggttttctttggagggggaactctgtatatgctaggtgtttcttaaactttcccaagagtttgggtcaaatttctgcttatggctgggcgtggtggttcatgcctgcaatcccagcactttgggaggccaaggcaagaggaacgcttgagcccagcctgggcaacatggtgaaatcccatctctacaaaaaagtacaaaaattagctgggtgtggtggcacccgcctgtagtcctagctacttgggatgctgaggtgggaggatcacttaggcccaagacgcagaggtagcaatgagccgtgatctcgccacggcactctagcctgagcaacagaaccaggccctgtcttctaaaaaaaaaaaaaaaaaaaaagaaagaaagaaaaaacagggctgggcgtggtggctcatgcctgtaatcccagcactttgggaggctaaggcagatggatcacttgaggccaggagtttgagaccagcctggccaacatggcgaaaccccatctctactaaaaatacaaaaattagccaggcatcgtggcatggacctataattccagctactcagtgtggctgaggcagtagaatcgcttgaaccagagaggtagaggttgcagtgaactgagatcaggccactgcactccagcctgggcaacagagcgagactctgtctcaaaaaaaaaaaaaaaaaaaaaaaaacgaaaaggagaaaagaaagaaatctgtttatttcttagcttgcaagtcaccttgctgttagttctctcacagttatctgccccaggaacacagagacgattatagataaagatcctgttaccttggacctggtaaaggctgctggactaggtgtagctcactcagcctccagctttctgttcattatcttgattgagggggtgatttcatgggtgtgtacatatgtcaaaatgtgttggaactgctgggtgccgtggctcatgcctgtactctcagcactttgggaggcggaggcgggcagaccacctgaggtcaggatttcaagaccagcctggccaacattgtgaaaccccatttccactaaaaacacaaaaaaagttagccacgcatggtggtggatgcctgtgatcccagctacttgggaggctgcggcaagaggatcacttgaacccaggaagtagaggttgcagtgagccaagatcattccactgcactccagcctgggcatagagactgcatctcaaaaaaacagaaaaaagtaggccaggcatggtggcttatgcctgtaatcccagcactttgggaggctgaggtgggtggatcacaaggtcaggagattgagaccatcctggctaacatggtgaaaccccaactctactaaaaatacaaaaaaattagccgggcgtggtggtgggcgcctgtagtcccagctactcaggaggctgaggcaggagaatggcgtgaacccgggaggtggagcttgcagtgagccgagattgcgccactgcacaccagcctgggcgacagagcgagactccgtgtcaaaacaaaacaaaaaaaagtgttggatctcacactttaaacacgtacagcttcttgcctgttgattatacctccgtaatgctgtttttatttttatttttttaccattaatagcccaagtgggccccctcacactcccacgtgtatacttaatcctgtctctgtgcgagtaacaatcagatggtaatccccccccacaatccctgctccactactccacctctggggctggggactgctcattttttccctccaaccccccagagaccagatcctctctcctccctcacggacctccccactttactctgggatgctgggggcccctggagatctcaccctggcctgaccatcactaactggggagagacttagaggcagacttgaatactccaacctccagggagccagggctggctcagaagaaaggtctaggggcagggaggggtattggctggggaggggactctgcctagcataggaagagcaggggaggcctcttaaatagggattttaatctgatccaggacttgaaaggcaagtgggaactggcccagggaagagggcggaggcatgttggaaaaagggcactgatgcagaggcctggaggcttggggctggtcttgggaatcataccatctggatggcatggggctgaggtaaccagagcttgaatagaactgcagaagagacagatgattccagaagggtaaggaggtggaggcccctctttacttccttcccacagcaggcaccaggccagagttgggtgggcacctgctgggggatcctcatggtccagtattggttgtaggttttgagggggctgacaggagaggtggttgccagggaatggttccaagaagatgcaataggggaggaggctggggatacccaggggacatggcccagcttacggaggctcctgagcttccaggggcatagacattaagaaattgcacgctgagcccgagtgtggtggcttgtgtcggtaatcctagcactttgggaagccatagtgggagaatggctcaagaccaggagtgcaagaccagcctgggcaacataccaagaccctatctctacaaaaaaataacaaaaattagctgggtgtggtggcatgctcctgtagtcccagctgcttggaaggctgaggcgggaggatcacttaagtccaagagttcaaggctgtagtgagctgcaatggtgccactgcactccagtctgggcaacagaatgagaccccatctctttaagaaagaaaaattgtggccaggtgtggtggctcacacctgtaatcccagcactttgggaggctgaggcaggtggatcacctgaggtcaagagttcgaaaccagcctggccagcatggtgaaactccgtctctactaaaataaaaattacccgggcatgatggcaaacacctgtcatcctagttattcaggtgggtgaggcaaaagaattgcttgaacccgggaggcagaggttgcagtgagccgagatcgcgccactgtactccagcctgggcaacaagagcaaaactccgtctcaaaaaaaaaaaagaaaaagaaaaaagaaaaattgcatgattagcttctagtaccccgaaagcttagagggcaagtagaaggaggagcttgctttttggggaaactttaatcagcagaggtaggcctggggaggcctccgcaggaccgtatgaaccctgagcccactgtgggagcagagcagccccctcctcacccaaggaagcttctatccttgactgtcccccttgctgactgagtgacctgtgatctgtctctagtcatttcttgctttgagccttgggcttcccagttcccacgtttcctttatgggaatgtttatggagatcaagccaaccatgcctgttaagggtgggttatttttctagagagtttgaccacctgagctaacatccttgcaccctcccacctgtccatctgtctattctactcattcatccatgtagcaaacatttatgtggcatctaatgtgtccagccctgtctgaggctctgaggatacagcagtgactcaaacaacattcttttctttcatgaaacttatgccttggggtgaagaagacaccccaatgaaacagatcaactgggacaagagggttgaaggaactacacaggatcaggagacagaataatatggtggcctctttggtggtagtctgagaagtcttcttggaggaggtgacatttgagctgaaataagaatgataacacagtcagacatgtatgtgactgtctggggtgcaaacatggtacaagtgagcttggtgagttggaagcccagcaagcagcagttgctatggattaagctggggaggcagaggtggggaggcagcagggccagaatgtagagggcaggaatgtgtgcagaaataaggggctcaggtaaggcggaaccttgaacttggggtccaccttggggtctttggggggagtggtacctcaaccggcagcatctctggtcactaacaccctgtgggacctctgctcagagaggctcagagtggaagagacaggtccgtctggaagggacagccaggacccggtgcagaggcaggctgtggttatctgcaaacagcccccttccttccagcatgtcacgtgctcccgcctgagcctctggccgcaggaatcaggtgaccccaggcagcgggccaggctgcaggggcgggtgagtgagtcaatgtatgcaagtgtgtgtgtgtgtgtgtgtgtgtgtgtgttttcatctctgggaggcccagacatctggggtctgaattaattgcctttttcacaaccatggacaagtcctgtatttccagctagattgaaagcaaaacaaaacaaacctatgtgcatagctctgatctgctgagcagtgccagggtccttgggggttcggggaagccgtgggaaccagtccttctcactcagacccctgaagaggggcagggatcctctactcatgccccctaacccacctcccgtgtcagtacaaagccccattctctctctttcccccaatctggggctatttttagccactaagaaggattatcagtttggttcccaggtggcaggggccaagctgggagtggggccagggaggcttcaaacagcagccaggcttgggggcgggtggggtgaggggagaagaggctggtcacactggccctgccacccacgcggtggctctgcagatgaccctgaagctgctgtcgtccagcccagcccaaacacttcagctgcagctttaagggaaggtggcaggggcaaggaaagcttccagcagccttaggcacctcagatgctggaaaccgtcctaagggcttggaagaaccatctagaagcctccataggccagcaccccttctttccagaccactccccatcctgcccccacctcctgtctagcagtaactatcacagtctaagctgttttttggggggtttttttccgaaacaggatctgctccgtcacccaggctggagtgcagtggtgtgatcacagctcactgcagcctcaaactcctgggctcaaccagtcctctcacctcagcctcctgagtagccgggattacaggtgtgtgtcactatgcccacctaatttttaaatttttttgtcttgctatgttgccctggctggtctcgaactcctgaccttaagcaatcctcccacttcggcctctcaaagtgctgggtgtgagccactgcactcggtcctctaaattttactaggtgctcactccacctcaggtgccattccgaaccactccatgtggaagaggggctattgtttgttccattttacagataaaactgaggcacagataggccacgttccatgcctggtaaacgggtgaggcaggaatcaggaatcagatccgttgtgatatcagcatggagtgtttataaactgcccgcctgccctgagcctcacaatagcctggtagaacaaggagggaatctagctgtacccatttttcagatgggacaactgaggcccaggaagacagaggatgacagggaacaaacagaagaactggatccaaaagagaaaagctagaaattgaggaacacatccctcagcctcatttcctcccttccctcaggagaagttgagccttgctggcctgaggtgcctggttatagccatgcctgagcccctcccatatgccagactctgcctcaatgccccaggtgcaaggtctctgagctgcttaaccacccttcagggagggcacctgtcccaccaacaggtgacgaaattgaggctcccagggctttgaagcattgcagctaggactccagccagtctgctgggctccagaccctgttcttttctcaaaccacagcatcttttatttatgctttaagagggagaagagggaagggacgagacagagacaggttggtgaggttagtgagagagtaggacctctggggccagacctctgcaatcagggcatatcagtctgaagcctccttggagagctccctggtttagaaagtgcatctgttcccctttctgtgccactcaggaagcaatgggcatgattcagcagaggagaggagagtttagaactggttatgcttccttctccaaccctccctgcaaaaacactggccagctcctgacatcacagtaagacagggttgcgggagggtgctttaacaggatccaaagcagggcaattgggctgctttcaggaggaggtgacaactgagctgggttttgaaggatgcataggagtttgccaaacagagaaagaaagcgtttaagctcttcagggcagagatgttgcttgttttccccaccattttgtgtcttcagcacccaaatactaaatgagcattctaggcagaggccagtatttgtaaaggctaggatgtgtgaaacgatatggtctggtgggagcagagtatcagtcagtaaactggtgggcattgaagctgggcacatcagcagaggcaaggcttgagattgtgagaagccattgctcctgtggttctccctcatcccctacactcatcatgacttgaatgtaccaaggtgtgcaaggatgcatccaagacccttgggtgaggggaaaacatggagctgggggtctggatgcctgggccttcctaggacacctagtccccttccatctgcaccttggggtctgtcagaaaggtagcagggtctctgagaaagctgcaccagtgactcagaaggctgaggtgggaggatggcttgaacccaggagtttgaggctgcagtgagctatgatcaggccagtgcactccagtctgggtgacaaagtgagaccctgtctctaaaaaaaaaaaaaaaaaaaaaaaaaaaaataggggattgcagataccctgcagtggtcatggctttggctgtgagagctgagtacagttgggaccaagagtgccaagctggccatgtgtccttgagcccccacgggcacacgggatcaagccaaccttgtctgctagtgaagatgatttctttttcttgagaaatcaaccacctgggctgaagtccccacatccacccagctgttcatgtgtctactctgtctgggatgcctgggcctcgttgtaggtctagactagctgctatcccacacccttgactgcttgttgggtcactgacttctagtgcccctccccaaccagagtatccaatgctagcaacagcttctaatacttcactgatgcctaaatgtcagttgccccatagcatggtacttagcctgccccttcatgtgcagtctcttccttttttttttttttcccccaaaacagggtcttgttgaccccttgctgatagatagaggattccatccatcttcatggatttcaacagcagccactcactgacaagtcctacccaggccccacccaccccaagcctgtgccccaaacctgagtagctcctgcctcctccacacgcccacgggaacattttagctgccctcccccacacccacaatttgtgttgtctgacacttagcctgactcctgtcctgaaatcagctcatccattctggttcatccagttcttcagactggaaggctgacagcttcagtggccaagtggggtgaggctgaagatggaattaaggttgttaatcagctgagcttgagatgggagatcatctgggtgaacccagtgtcatcacaagggtcttaaaatgaagaagacggaggcaggagagacactgtcagaatgacaaggtgggagaaagacccaactagccactgctggctctgaagatggaggaagggaccaggagctggagggtgcaggcagcctctaaagccagaaaaggcaggaaatggctgggtgtggtggctggagcctgtagtcccagctactcgggaggctgaggcaggaagatggcttgagcccaggagatcgaggctgcagtgagctatgattgcaccgctgcattccagcctggaagacagagtgagagattgcctccctgcagaaaatgtagtctcttagcaattttccagtatatactatattattaactaaaatcatcatgatgtacagatctcttggacttactactgctgctaactgaaatgtcatatcctttgaccaatatcttgccaatttcctctcccaacccttctcttttctggctccactttggaaagcatttggctcttggggggccccacctctaaaatgtctctggaatccccttatctctaccttatctcaactggacatgccagagcaccctcttctggcctccaaaatgctacgccctgcatggcaaccaacacctgagaatccctgcattattcaaaatagaaccaagggcaacggaaccctcacattctcctgctgggagtgtaagatggtgcagtcctgccttggaaagcagtttgcccaccttggcctcccaaagtgctgggattacaggggtgagccaccacccccggctgccccctaggctggtcttgaactcttggctttggccaggcgcggtggctctcacctgtaatcccagcactttcggaggccaagacaggtggatcacgaggtcaggagatctagaccatcctggctaacatggtgaaaccctgtctctactaaaaatacaaaaaattagccgggcgtagtggcgggcacctgtagtcccagctactcgggaggctgagcttgcagtgagctgagatcgtgccactgcactccaggctgggcgaccgagcgagactccatctcaaaaaaaaaaaaaaaaaaaaaaaacactcttggcttcaagcaattctcctgcctcagtctcccaacgtgctggaattacaggcatgagccactgcacctgggtctattttttattttatttatatatttttattttttattgatttactctgtttttggagacaggtatcactctgtcatttaggctgaagtgtggtggcatgatcacagctcattgcagccccaaactcttgggcttaagcaatcctcctgcctctgcctcacgagtagctaggattatggccacatgccaccttgcccggctaatttttgtattttttgtagagacagtttcgctatgttgtccaggctggtctcaaacccctgggttcaagcaatcctcctgcctcagcctcctaaacactggggttatggtatttttatttttatttattttatttatttttgagatgaagtctcgctctctcacccaggctggagtgcagtggcacaatcttggctcactgcagcctccgcctcccgggttcaagcaattctcctgcctcagcctcctgagtagctgggattacaggtgcccaccaccacccctggctaatttttgtatttttagtagagacggggtttcaccgtgttggccaggctggtctcaaactcctgatcgcaagtgatccactcaccttggcctcccaaagtgctgggattacaggcttgagccaccatgcccggcctatttttattttgtaacatggcaaggttatcatgaagaactgacaaaactaagctttgatgacaaaaaaaaaaaaaaaaaaaaaaaaagctggtggggggcagggcaaggtggctcatgcctataatcccagcaatttgggaggctgagtggggaggattgcttgagcccaggaggtcaagtgtgcagtgaggtatgatggcaccactgcactccagcctgggccacagagtgagaccctgtctaaacaacaacaacaacaaaaaaacaaaaaaactggaatggttgttacttttggatgacaggacaggggtggaggttgactgggaagaggtatgagggaagtttctagaggaaatatttgtgataggagactggattagtcaggtacatagttttgtccaaactcagtgactgtacccttaaagatgtgtgcgggccaggcgcagtggctcatgcctgtaatcccaacacttcgggaggccaaggcgggaggatcgcttgagccaggggtttgagaccagcctggataacatagggagaccctctctctacacaaaaatttaaaacattagccagtcatggtggtgtgtgcctatggtcctggctctgcgggggctgacatgaaaagaccacccgagcccgggaggtcaaggctgcagggagccatgatcgctgcattccagcctgggtgacagagtgagaccctgtctaaaaaaacaaaaagtctgcatttcacttgggtaaattttaccttgaaaggaaaaacccataagcaaatattgaaccctagttaatgatctgtgtgctgacatgtgtaggggcgatgtggcctgaggtcagctgcctactttgaaatgcatcgggaacaagcagatagactgatggtggatagagggatggatgggcagaggcagatgggtgatggaataaacagaatggaatgcaaaggggagaatctagtggtgggaatacaggtattcactgtaaaattctttcaacttttgtgtaggtttgaaatgtttattataaaacattgggggaaggccgggcgcggtggctcatgcctataatcccagcactttgggaggctgaggcgggcagatcacttgaggtcaggagtttgagaccagcctggccaacataacaaaaccccatctctactaaaaatataaaaattagccaggcatggtggcgcatgcctgtaatcccagctactcgggagactgaggcacgagaattgcttgaaccctcaaggtggaggttgcagtgagctgagatcgtgccacggtactccaggctgggcggcagagtgagactccatctcaaaatgttgggggaaataatccagattcttccctgcggcccccatgccttgcaggctctgtgctgcccctcatcacctccctgccctcccctcctccctctctcccccttgctcactgcaccagccacacggacctcctcactgttgctccaacatcccaggcatggtcctgcctcagggcctttgcacctgctgcgtatttatctagaaagcccctcccccagccccaccttcttgtgtgaaaaacccacaaccttctcatctttttttttctcatagggtcttgctctgtccctcaggctggagtatagtggtgtgatcgtagctccctgcagcctcaaactcctgggctcaagtcgtactcccacatcagcttcctgaatagctagaactacagatacgtgccagcacacctgactactttttaaattttttgtagagacagggtcttgctatgttgcccaggctggtcttgaactcctgagctcaagtgatccacctgcctcggcctcccaaagtgttgggattacaggcatgaaccactttgcctggcctgacctccgcatctttttttttttttttttttaagatggagtcttgctctgttgcccagtcttgagtgcagtggcatgatttcaactcactgcaacctctgcctcccaggttcaagtgattctcctgcctcagcctctcaagtagctggggttacaggcacatgccaccacacctggctgatttttgtatttttagtagagatgaggtttcaccatgtgggccaggctggtcttgaactcctgacctcagatgatccacccgcttcagcctcccaaagtgctgggattacaggtgtgagccaccgcacctggcctgacgacctcatctttaagtcccagctcaggtggcgcctccttagagagcctctccttgatcacatttaaaatcacgccactctgttatctacccggcccgttatactttggcatctcattcatttatgaatctgtttacttgtttattggctgccttctctgttggtctgtgagctgggcaggaatgtgttggctttattcccctgctgtgtcgccaaggcccagccctgacctgacatgtacaagtcaattggagaatatctcttgcctggatggatggatggacagacagacggatagatgcaacgacagatggataaatggatggatggaaggggaaatggatagatggaagaaaagatggacagaaggatgggtgggtggaaggacacacaagtgagtgatggatgatgagcggatagatgtttagatgggtggacagatggatgatgaatggatggatgatgggtagatggacagatttttggatcagtggatggatgatggctgggtggacagatgtttagatgggtggacagatggatgatggatggatgggtgaatgggtaggtggatggatgatgggcaggtggacagatgtttggatgagtggatggatgatgggtgggtggacagatggatggatgaatggatggggagatggatgaatgggtgggtagatggatgacagatggacgataggtggatggacaggtgtttggatggatggatggatgatgggtggatggatgaatgggtaggtggatagatgatgtttgtatgggttgatggatgatgggtgggtggacagatctttggatgggtgggtggatggatggtgggtgggcagatgtttggatgggtggacatatggatgatgggtagatggatgagtggataggtggatgatggataatgggtggatggacagatgttttgatgaattaacagatgaatgatgggtggatggacagatgtttggatgggtggatggatggatgatgggtagatgagtggataggtggatgatgaataatgggtggatagacagatgttttgatgggcgaacagatggatgatgggtagatggatgatgagtgggtggacagatgtttggatgggtggatggatgatgggtgggtggacagatgtttggatgggtggatggacgatgggtggatggatgatgggtgggtggacagatgtttggatgggtggatagagggatggatcggtagatagatggacagggggatgcgtggacagacgaatgaacgaacaaactttctgagtgggaaccactgtggtaggctggacccttggctcaagatctcagggaagggagcagctctttgggctcctcaagcaggctgggacacgctggccggagctgccccacctcgaccgccactccattatcaggcaagctcagttatgcagtaggctctcttaccctcttgctttgtgggctctgggatagcaagagacccccctgaaattcccacctagagaggagcctaccttccatagatggccaggaaaggaactctggattttttttttttttttttttttgagacagagtcttgctctgtcacccaggctgcagtgcagtggcctgatctctgctcactgcaacctccgcctcccgggttcaagcaattctctgcctcagcctcccgagtagctgggattacaggcgcacaccaccatgcctggctaatttttgtatttttagtagagacagggtttcaccatgttggccaggctggtcttgaattcctgacctcgtgatccacctgcctcggcctcccaaagtgctgggattacaggcagtgagccactgagcccggcctctggatttctttaaatccttcatctttgggggctgcttcagaggcagcttcctgcagtggaaagaaaccttcctggacgtttgaggactcaagttcttttttttgagacagtttttctctgttgcccaggctggagtgcagtggcatgatctcggctcactgcaacctcctcctcccgggttcaagcgattctcctgcctcagcctcctgagcaggtgggattataggcgcctgccaccacgcccggctaatttttgtatttttagtaaagatggagttttgccatgttggccaggctggtctcaaactcctgacctgaagtgatctgcccacctcagcctcccacagtgttgggattacaggcatgagccatggtgcccggccacgactcaagtttctgaccccaagcagccactcccttgacttctggctaccatcttggcatcagttaagtgcagagtaataactactattttgggctgtgttattattactcttgttaaagatcaatcggccaagcactttaggttgagaagcctgggtattactgtctctgtttttttgttttgttttgttttgtttttgagatggagtcttgttctgtcacccaggctgcagtgcagtggcacgatctcggctcactgcaacctccgcctcccaggttcaagtgattctcctgcctcagactcctgagtagctgggattacaggcatgtgccaccacgcccagctcatttttgtatttttagtagagacagggtttcaccatgttggtcaggctgctcttgaactcctggcctcgtgatccacccaccttggccttctaaagtgctgggattacaggcgtgagcaactgcgcccggcctactactctgttttacagatgaacttgaggttcagagaggtcaagtcatttgcctgaggacacacagcccaactctgccttttaacactgaccaggcaatggagtgggagtgatgagaatgaagtggtggctcttctgggaccagaggacagttccaaagtcccaggcaaggggagttccatcttccagtcctgcctcctggttgtcaactgcgctgataggggcccgagtaggagttctgaggctccagcctctcaggccccacttgccccacccattctgcttgcagacctcccagctaactggaacctgtgtccacagaatgctgtccagtttcaacgagtggttttggcaggacaggttctggttaccacccaatgtcacgtggacagagctagaagaccgggatggccgtgtctacccccacccccaggacttgttggcagccctgcccctggcgctggtcctcctggccatgcgccttgcctttgagaggtgagtgtctgccctgccgcaatccattgcccccgcagtcgctccagtatgtgctcgtgccctgtgtgcaatttgccattgcagcatgtcccgagtagaagctggctttgcaccaaagcgcgttccctggctccagcctgcccccagccgccaccacccacacttctggcctctgatggctggtttataggaacactgactgcagctggtttataggaacactgcactgcctgcagcctgcagctgggtatgccagcatcttcataaaacagggatgggaggccgggcacggtggctcacgcctgtaatcccagcactttgagaggctgaggcgggtggatcacttgaggtcaagagttcgagaccagcctggccaacatggtgaaaccctgtctctgctaaaaatacaaaaattagctgggcgcaaacctgtaatcccaactactcaggaggctgaggcaggagaatcgcctgaacctgggaggtggaggttgcagtgagccaagattgtgccgctgcactccagcctcggcaacagagcaagactccataaaaaaaaaaaaatgtgagctggggtgttatcccatcccaaaggcatcccagggcctctgtgaaggacagtggggtgggcggagggttttccagtttcaaacgcaggggttttagcccttaaaaaaaatttttttttgaatctaggccagacgtggtagctgattcctgtaatgtcagcaatttgggaggctgaggtgggtggatcacttgagtccaggagttcgagaccagactgcgcaacatggtgaaacctcatctctattaaaaaaaaaaaaatacaaaaattaggctgggtgcagtggctcatgcctgtaatcccagcactttgggaggccaaggtgggcggatcatgatgtcaggagttcaagaccagcccgacaaacgtggtgaaaccctgtctctactaaaagtacaaaaaattagttgggtgtggtggcacatgcctgtagtcccagctactcaggaggttgaggcaggagaattgcttgaacccaggagacagaggttgcagtgagctgagatcatgccagtgcactccagcctgggcaacaagagcaaaactccatctaaaaaaaaaaagaacaaaagcctcatccccaccagtagctgggactgtaggcatgccaccatggctggctaacttttttttttttttgagacagagtcttgctctttcaccttggctggagtacagtggcacaatctcagttcactacaacctctgcctcccaggttcaagcgactctcctatctcagcctcacaagtaactgggattacaggcatgtgccaccacacctgactaatttttgtatttttaatagaaacggggttttgccatgttggccagactagtctcaaactcctgacgtcaggtgatccacccaccttggcctcccaaagtgctgggattacaggcaagtgacaccacaacccagctaaattttgtatttttagtagagacaaggtctcaccatgttgcccaggttggtcttgaactcctgagttcaagcaatcctcccgccctccacctccaaaatgagactttaagaggcaggaggcaggaacaaaaaccagaatcctgagttcaaatttcaggtctttcacctgctcacagtgtcaccttgggcatgtctctgagcctcagtttacccattaggacaataggaactgagttagggttagacgagccaatgtatcacatggacttggccccatgcttagcagataataagcgctcattctctccgcatcatgatttattctgcaatgagttccttgctaggctgctctgagcctttcaccaaatgaggcaggatgttaggagggatggtggatataaaattcggtccccacctgtggtgttggcgcgccctcttgtgggcaacgtggccattgaccagggtccctgatctccaagcctctaccccggaatgggggatgctgggaggaggggcttggagcgggaacagccccagcccctgcccatggggagcccctagactggcggggggtcagaccaggacccaggccacagtgagacaggcagtgaagagactcttgtccctggtttgggattgggcaaaggtacctgggtaccccaagagttggtctgcacaccctcaccctacagacaaaggtccagctgccttttttttttttttttttttttggggagacagagtcttgttgctctgtcacccaggcttgagtgcagtggtgcgatctcgactcactgccagctccgcctcctgggttcacaccattctcctgcctcagctcagcctcccaaatagctggggctacaggggcccgccacctcgcccggctaattttttgtattttcagtagatgcaatcctggctcactgcaacctccacctccaggttcaagcaattcacctgcctcaacctcccgagtagctgggattacaggtgcacgccaccacacccagatgattttgtattttcagtagagacagtgtttcaccatattggtcaggctggtctcgaacttctgacctcacgtgatccgcccacctcagccccaaagttctgggataacaggcatgagtcagctgcctttcttatgtttggtctaacgcagcagccaggccacccctccagggccccaggggatgaggccaggaataagtggaaaatcgagtcctgccccacgagcctttctgactctgggcctccaaaccctctgatcagatggaaaagaaagaccaagtcttaggccgggcgcggtggctcaccgctggtaatcccagccctctgggaggccgaggtgggcagatcacgaggtcaggagatcgagaccatcctggctaacacagtgaaaccccgtctctactaaaaaatacaaaaaattagccgggcgtagtggcgggcgcctgcagtcccagctactcgggaggctgaggcaggagaatggcgtgaacccgggaggcggagcttgcagtgagccaagatcgcgccactgcactccagcctgggtgacagtgcaatactctgtctcaaaaaaaaaaaaaaaaaaaagtcttacacaccctgccatgtgccagctgtgctctctgagcctgtaactttgcccctccgagacttggttatcccaccggcagcatgtctgcccccacacacaggcagtcccatctcttcacctgggctgataggctctgtctcctttgcacccagattcattggcctgcccctgagccggtggctgggtgtgagggatcagaccaggaggcaagtgaagcccaacgccacgctggagaaacacttcctcacggaagggcacaggcccaaggaggtgagagccccccatgccctccgacccgcactactgccctgggggtggggcgtggggatggtgtgtggcccatttgttggggcaggagaagccaaggtggctgcaggcacccctgcaatgcccctactttccactcttcatcctcaattccctgggaaagggctctaccccccagcctccctgggaaacgacgccccacccctcccagcatccctgggacatggagccccacccttccagcctccctgggagatgaggaccccccccttcccagcctccttgggagatggggcccctcccctcccagcctccctgagccttagtgggcacagttgcacaatggacagattctaggagagtgagagtagttgcttgctctcctatcctggggaggaatggaaggtctgagctgatagggaatggagtaacagaagcagccctgtgaccctccctccattcccgtctctggtgtggctgcccgctggacagggtctgtgctgtggaggcgtggctgcgtcctgagtggggtggggaatggtgaagaccacataccctagaggcgacagggcagcttccgcagagctagacgtgactccccctttacttgtcaatttccctcttcaggtagggcttggggctggggcaaggtctcaactgcctgtctaggttggaggtgagaactgaccgttctggagggacgcagggaagcctatccgggggtaggggatgctgcacgccagcatctctcttaatcccatccccgtcagcgacctgcctgccctatgaacaggatttgcttctcttagggcccaagtgttctgcagggccccacgctgggacccccaacactgcccctccatatagacatggtcaccctgtaggcaagatgtgggcctgcagtggagagggcagagccaagtcctgtctggggacatgggggaagccaccacagggcctctgtgacccttgtcctcatcaccccctccccagccccagctgtctctcctggccgcccagtgtggcctcacgctgcagcagacccagcgatggttccggagacgccggaaccaggatcgaccccagctgaccaagaagttctgtgaggccaggtaagcccaggatggggcttctggggtgcagggaagcgggccggggtggggcggggcgggtgtctgctattttcacagctccctccccatccacagctggaggtttctcttctacctgtcctccttcgtgggcggcctctcggtcctgtaccacgtgagtataccagagtatagctgactgctcacctgccccatccacctggcctagatctggcaggagtgggggtgtggagtggtgcagccagagaggaaaacatgcagctgaggagagagcgagctttgcaagatggtggtgaatgttcactcaacaggtatttggatttactatgcaccaaaagttggggttctgcagtgaatgagccccccagtcgagagtgagaagcaggaaaaagcagggctgggtgaaggtagcatctatgtgactgtggaaggagaaccaaagagaccgcagacccagggtgggaggttggattctcacctctgcacagcctgacacccatttccctgcaggagtcatggctgtgggcaccagtaatgtgctgggacaggtacccaaaccaggtgagtggcagagtgtgtgtgaatgcttggagggtgagggcgatgatcacagttgctgcagccatgggcatgggacccgaaccctgacactacactgtcattccccactgagtcccacgctctttgattcctctggggaatagagaggggccagaaaaccaagcaggagcttccaccaaaccactgcccttgattacctccagggatggggagctcactcattgggattcaagtatcctggttttgagcaaacggagtgggcccggagccatacccctgcccgattggagccttcgctccccacagctaaccttgtcctgtcctgctgcagactctgaagccatccctgtactggtggtacctcttggagctgggtttctacctctcactgctaatcaggctgccctttgatgtcaagcgcaaggtgaggccaaataagagtctggaagacccagtctctggccgggatgctggggtgctggggggtagggcagccttacaaccgcaccttgagagctccctggtgcctcctgcaggagatatagaggccatgggcccagaggccacaccaaccccctgaaaggacccacttcttggcccatagggtgggggaccttccagcatcaagcctcgtccccactatgacccaccgtctactgcaggatttcaaggagcaggtgatacaccacttcgtggcggtcatcctgatgaccttctcctacagtgccaacctgctgcgcattggctctctggtgctgctgttacacgattcctctgactacctgctggaggtgggcccgacccctgcctgacccttcccagctgctgtacccagccctcccaggtgccccagagatgaggtcccattcctcccaaccttcctgggagatggagccccacccctcctgtctttctcgggtgatgaggccctgccccctctgtcttccaggctgataaggccccaccccctctgtcttcctgggtgatgaagccccacccttcttggcttccttgggcagaggcccccgccttctcagcttccttgggagatgaggccctgccccccatcttcctgggagataaagccctgcccctctcagctccctccttggaggataaagctacacacatgtgcacacacgcatgtattcacatttttttttttgagacggagtctcactctcttgcccaggctagagtgcaatggcacacactgctcactgcaacctctgcctcccaggttcaagtaatctcctgcctcagcttcccaagaagctgggattacaggcacttgccaccatgccagctaacttttgtatttgtagtagagatggagtttcaccatgttggccaggctggtctcgaactcctgacctcaggtgatctgcctgcctcagcctcccaaagtgctgggattacaggcgtgagccaccatgcccagcctatattcacactctttacctttcctgaaaaggtaggtagttcctggaaacaaggccccaccccaactcacctggtcccatcctatagcaccttctctttgagaccagggccctggtcctgagcccatttctccctgctgccctttccaggcctgtaagatggtcaactacatgcagtatcagcaagtgtgcgacgctctcttcctcatcttctcctttgtcttcttctacacccgactggtcctctttcccacccagtgagtcagccctcccatgggggtcagggaggtgggagggcgtgtctgagattccaggactgcctcaccattggtaccctgccccaaggagctggggatcttggctgggagagttccaggaggaggcagggaagggtgtgccaggcacagggcacggcatatgcaaaggcgcagaggtgagacagagaattattattactcagcgtgcctggaccatgcagtgggaggaagggtcagggctgccagcgcaccaaagtctgcccagtaaatatttgtgggggcctcttgagtgtgctggtaacacagcagaggccacagttcaaagatcccggcccttgtgagcagacattgcatgggtgggagcagatggtaagtgaggcagccacgtgaactgcacagcatgcgaaggagagatttactaacaagaaaataaatttgacgggccgggcgtggtagctcatgcctgtaatcccagcactttgggaggctgaggcgggcgggtcacttgaggtcaggagttccagaccagcctggccaacatagtgaaaccccatctctactaaaaatacaaaagttaggctggccacagtggctcacccctgtaatcccaacactttgtgaggctgaggcaggaagatcacgaggtcaggagtttgacaccagcctggccaacatggtgaaaccttgtctctattaaaaattaaaaattagccggacgtgatggtgcatacctgtaatcccagctactcgggaggctgaggcaggaggatcacttaaacccagaaggcagaggctacagcgaatcaagattgtaccactgcactccagcctgggtgacagagggagactttgtcttaaatcaaattggccaggtgtgatggctcacgcctgtcatcccagcactttgggaggccaaggtggctggatcacctgaggtcaggagatcgagaccactttggccaacacagagaaaccctgtctctactgaaaacacaataattagctgggcatggtggcacacgcccgtaatcccagctactcgggaggctaaggcaggagaatcacttgaacccaggaggcagaggttgcagtgagctgagatcacaccactgcactccagcctgggcgacagagcaagactctgtctctaaataaaaaaaagtcaggaagggagcaggaagtatgggagaggtgggtagttggaattagaatggcaggtaatgcctcgctggcagcgtttgtaccgagagatgggagggaggtgagggacagaaccacgttgatcagaggggaagtgtgttccaggcagagaatagcatgtgcaaagggcctgaggcaagaccatgcccggcatgttagaggaagagcaaggaggcctgtgtggctggagcagagtgggtgagggggagggtaggcaggagatggagtaggccgtgcaggtccttgagggctgtgggcaggactttggctttgaccccgggggagatgggagccatggaggttataagcagagggattcaatctgacctaggtgttctgggtgccctttggcagctgcaggggaaacatcatgggaagtgtgggcaggagtgaggggacccagggtaggcgagagaagtgggcagacttaaggggatgcctctgggatcaggaggtgggaacaagcacagaaggaactgctcgaggcagcaggagctcagccctgctgggtttgaggggtctgtggcctcagaggagacatggagaaggcagtgggcatgccagtctgggcttctggggaaagaggtaatgtaggagttgtcagtccatggctggtatttgcagccagcagcctggatggcatcacctagggaccaggtatggacagagagtctcagtcctcgggcttcctgatgtttgcaggtcgagagaggaagaacagggcccatggagcatgagagtcagattacatccctcctctggctgccatcctccatggctcccacctgtcttggtttcaaggcctgaggagattaggcagaagtggctgtgagatggggagatggtggggtgcggggagccagagagggaaggggcccagggaggagggagggctgctggcaacctgttgtgccagctggtggggctgcagggctgagcactgtggagtgaggaaggcgaggtcgctggtcaccctacagctgattggggggtaggagaaacacagcagctacagccagtactttttgagatggagtcttgctctgtcacctagactggagtgcaatggcgtgatctcagcccaccacaacctccgcctcccgggttcaagcaattctcctgcctcagcctcctgagtagctggaattataggcacacaccaccacacctggctaatttttgtatttttttttttttttttagtagagatgggggtttcaccatgttggccaggctggactcgaacttctgacctcgtgatccacccgcctccacctcccaaagtgctgggattacaggcgtgagccactgtgcccagcccagccagtactttcaaggagttccaaggaaaaaaaaaagcctacagggaaaagaaataagttggtgcccagaggggcagagtaaagagtgagctttttgtttttttctttcttgtgtgaaataacagtgggattggagttgatgataaagaaccagcaggaaggctgggtgcggcggctcacgcctgtaatcccagcactttgggaggctgaggtgaacagatcacttgaggtcaggagttccagaccagcctggccaacatggcaaaaaccacctctctactaaaaatacaaaaattagctgggcgtggtggcaggggcctataatcccagctacttgggaggctgaggcaggagaatcgctggaacctgggaagcagaggttgcagtgagccgagatcacgccattgcactccagcctgggtgacagagcaagactccatctcaaaaaaaaaaaaaaaaaaaaaaaaaaacaagaaccacagctgagtttgagaagaggatgtggtgggagctgggctccaggacagtgtcccaggcaacaagcaaggaggagttcgagggaaggagcagtgctggggaacattctttccaactggcttgggttgcacagtgaaaatgaagccccgcccctcccagcctccgtgggagacaaagccccacctctgtccggctacccgggagatgaggccccaccccttttttactccttgggagatgaggccccgcccctcttaaactctgggagatggagccctgctccctgtgtcttcctgggagatgaggccccaccgcctgccttcctgacatgaagcccctcccctatgaggtgagtaggcagtcgcctgctgatgaaggggaggtgatgggggtctgaggagtagagagaagctgccagagtgccacccaggaaagcagctgagttcataagtacccgcttgggtggggttcatagtcatgaatggccagtcagggagctcgtgtgtgtgttctgctcatttagtacaagcgagagggggcctcgcgtgcccagctcaagagtgttaggtatcatggggtggggggcactagggagccataggtggttatggagcagggaaggccatgccagttagaaattcttaggactgggggctacagcggctggtcaaaccccagcctcctcctctccccctggctgtaggatcctctacaccacatactacgagtccatcagcaacaggggccccttcttcggctactacttcttcaacgggcttctgatgttgctgcagctgctgcacgtgttctggtcttgcctcattctgcgcatgctctatagcttcatgaagaagggccaggtatggctggacctccccgggggccccagccctaagctcctccttcctccctgctctgagctccatccctctctctgttccccagatggagaaggacattcgtagtgatgtagaagaatcagactccagtgaggaggcggcggcggcccaggaacctctgcagctaaagaacggggcagctggagggcccaggccagcccccactgatggccctcggagccgggtggccgggcgtctgaccaacaggcacacaacagccacatagccgggcggggctggctgtaaggggttgcccccccgccagtgccttggatatttctggggtgactggactggcgcccctgggccacctttctggagacagggagggccccacccggggtgggtgggaaggctgatgatctgtctccagccccttccttctgcccacccacccttcttccctctgggcaactggacagatctgggagccagcagctggatgctgtggctggccagagacacctccaggctgtggcctgggggctggggggagccccaggctgaaaagggtccaattaaaacaaatggagccaaattttctgcctgagaacttgggtccctatcaaagttccttcttcatccccagagacccccgagggagccaggcctctgcttacataccccacctacgggatactcactgccacccaaggatgcagggccccaggggccccagacagcaacagagctcagagaccacccgctccccacgctgttcccagatgagcccctgactcgccagccagtgactcaaacaagcccctccctccacccttagggtacccttgggtcagcctctcaaagacccccttgcagactagctctgaaaggtcaagtcctttgcccaagctcacaggtaggtcacagaccaggcctgtctctgcagtcctttcttaagtccggtagattgcccacctttgtggtccctggatccttccttgggacagtggagggagtgggctgaaatcccacagacttcccaagggttagcctggggaggtcactgtctcttcaagagctccaaaaataaacagaggccaggcctggtggctcacacctggaatcccagcacttttggaggctgaggcagggggatcacttgaggtcaggaggtcaagaccagacttggcaacatggtaaaaccccatctctactaaaaatacaaaaactagcagggcagggtgacccacacctgtaatcgcagtcacctgggaggctgaggcaggagaatcgcttgaacccgggaggtggaggctgcagtgagccaagatcacgccactgcactccagcctggtcaacagagcaagactccatctcaaaacaaaacaaaagccaggcgtggtggctcgcgcctgtaatcccagcactttgggaggccgaagcgggcggatcgtgaggtcaggagatctagaccatcctggctaacatggtgaaacctcacctctactaaaaatacaaaaaattacccaggcgtggtggtgggcgcctgtagtcccatctactcgggaggctgaggcaggagaatggcgtgaactcagaaggcggagcttgcagtgagccaagatctcgcgccactgcactccagcctggttgacagagcaagactgtctcagataaacaagaaattggacaacaaagtattggagagaatgtggggggtcaataatctcacattatcgggggaatataaattgttaccaacactggaaaaaccattcagcattgtgtataatagttgaccttttataaagctcaaaagcaacccaaatgagataatatataggcatgaatacctagctagtagaactgtaataaaatataaacacaaaattcaaattagtaaattacctttgatctgggaaggtaagggaatgggattcagatagatatcaattactatcactgttctagtttttgaagtgaggtgaagttttttttgttttttgagatggagtctctttctgtcacccaggctagaatgcactggtgccatcttggctcactgcaacctctgcctcccaggttcaagtgattctcctgcctcagcctcccgagtagctgggactataggcacgtgccaccacacccgggtaatttttgtatttttagtagagaggtggttttgtcacgttggtcaagctggtctcgaacgcctgacctcaaatgatccacccgcctcagcctcccaaagtgctggaattacaggcgtgagagaggtgaagtttttgaagtgaagtgacacactcattaaatacaatttttaaagggatatgacaagctacaaaatggaagaaaatatttgcatatgatatatctgaagaggttctagcatccaagatatataactcttacaactcaataacaacaaaaaccctaatttaaaaaatgggtgactgggcacggtagctcatgcctgtaatcctagcactttgggaggccaaggcaggcaggtcacctgaggtcaagagttagagaccagactggccaacatagtgaaaccccatctctactaaaaatgcaaacattagccaggcgtggtagggggtgcctgtaattccagctactcgggaggctgaggcaggagaatcacttgaacctgggaggtgcaggttgcagtaagccgagatcatgccactgcactccagccagggcaacagagccagactccatctcaaaaaaaaaaaaaaaaaagggggggggggcaaagagaccaggtgtggtggctcacccctataatcccagcactttgggggcttaggcaagaggatcagttgagtccaggaattcaagaccagcctgggaaatatagcaagactcccttctccacaaaaaaagaaaaaaataggcaaaggacttgaatagaaatttctcgactgagtgtggtggctcacacctgtaatcccagcactttgggaggctaaggcaggtggatcacctgcggtcaggagttcgaaaccagcctggccaacatggtgaaacccatctctactaaaaatacaaaaattagccgggcatggtgacacgtgcatgtaatcccagctactcgggaggctgaggcaggagaatcgcttgaacccgggaggcagaggttgcagtgagctgagagcgcgccactgcacttcagcctgggcaacaagagcaagactccatctaaaggaaaaagaaaaagaaaaaaaaaattcccaaaaagaaatggccaataagcacatgaaaagatattcaacattgttagtcattaggaaaatgcaaatcaaaaacacaatgagaaaccactttacatccacaagagtgggtataataaaagaagtgttggccaggtgcagtgtaatcccctcatgcctgtaatccccaaactttgggaggctgaggcaggtggatcacctgaggtcgagacttcgagaccagcctgaccaacatggagaaacccctctctcctaaaaatacaaaattagccgggcatggtggtacatgtctgtaatcccaggtacttgggagactgaggcaggagaatcacttgaacctgggaggcagaggttgcagggagccaagatcatgccactacactccagcctgggtaacaagagcgaaactctgtcttaaaaaaaaaaagtgttggcaaggatgtggaaaaaatgaaacaactgtattcactgctggtggaaatgtaaaatgatcactgtggaaaatcgtttggtggttcctcaagaaattaaatagaattactatatgatccagcaattccactcctaggaatagacccaaaagaattggaagcaggtactcaaatatttacacatgaatgttcatagcagcactagtcacaataaaggtagaaacagctgatcacaatggttcactcctgtaatcccaacactttgggaggtcgaagtgggaggattgcttgagcacaggagttcaagaccagcctggacaacatagtgagacatggtctctgcaaaaaaatagaaaaatcagcagggtgtggtggcatgcacgtatactcccagctactcaggaagttgagtgagaggattgcctgagcccaggagtacaagactgctgtgagctatgatcatgccactatactccagcctgcgcaacagagagaccctgtctggaggggtggggggagaaaaaaacaccatagaaacaacccaaatgtccaataacaaattgtagtccatccatacaatggactactactcagccatgaaaaggaatacagcactcacatatgctgcatgtgaatgaaccctggaagcattatgctcagtgtaagaacccagacataaaaggtcacacattttatgattccacctatatgaaatatccagaagaggtaaacctataaaaataaaatgtatatttatagctgccgggggcttcagggtgaaggcataggaagaaactgtttaatgggtacggagttttatcttgcagcggtggaaatgttttggaactaaagtcgtggttctacaacattgcaaatgcactcgatgccactgaactgttcactttaagatggttcgttatgtaaatttcatcttaataaatgcatgaagaaagggatttgtatgtatcaactacagtgtctcatgaagcaaagattataattattccatttacctggtgtttccctatccaataattcccatttcctccaaaaaaacaaataataggaacctcatgggttgaaagagagcccataatgaagattagaaaatacactcctatagatgaatagcaaaggccgggcacagtggctcacgcctgtaatcccagcactttgggaagtcaaggtgggcggatcacgaggtcaggagatcgagaccatcctggccaacatggtgaaaccccgtctctactaaaaatacaaaaattagctgggtgtggtggcacatgcctgtaatcccagctactcgggaggctgagacatgccagcactccagcctggcaacagagtgagattttgtctccaaaaaaaaaaaaaaaaaaaaaaagatgaatagcaaaaatataaaaatattacatgtcaatgtttgtggagtgtagcttaagcaatcctttggaggaagtttgcagcctaacaggcttatattagaaacgaaaaaaaaaaaaaagcagcctggcgtggtggctcacacctgtaatcccagcactctgggaggccaaggggggtggatcatgaggtcaggagtttgagatcagtctgaccaacatggtgaaaccccgtctctactaaagatacaaaaaaaaaaaaaaaaattagccagcagtggtggcacgtgcctgtaatcccagctactcaggaggctgaggcaggagaatcgcttgaacccaggaggcagaagtttcaatgagccaagattgtgccattgtactccagcctgggcaacagggtgagactcaaaaaaaaaaaaaaaaaaaaaaaaaaaagaaaaagctcaaaaataattagctaagcatttaagaagattttaaagaacagtaaaataagctcaataaaagaaaaaacaggataagtgttaaaattaggatcatcaaacctaaaagttagttatttgaatgactaacagacgaacatctggcaagattaataaagaaaaataaaagaagtcacagaaaaaaatatagagacaggccaggtgcggtggctcatacctgtaatcccagcacttctggagaccaagggagaggatcacttgagcccaggagttcaagatcagcctggcaacatggcaagacccccatctctgcacaaaatttaaaaatcaggcatggtggtatgtgcctgtagtcccagctactcaggagctcaaggcaggaggaccacttgaaccaggagttcaaggctgcagtgagccgtgatcttgccactgcactccaacctgaggaatagtggaaggccccaacactaaaaaacaaaaataaagcatcatacatgtcaaatgttatatttaatgtcatatttaattgttgggtacataacccttaaggtaagaaataagacaatagctgctatcgccacccttattcaaaattattctgggagttctagttaacaataaatcaaaaaaggccgggcgcggtggctcacgcctgttaatcccagcactttgggaggccgaggcaggcagatcacctgaggtcgggagttcgagaccagcctgaccaacatggagacaccccatctctactaaaaatacaaaaaaattagccgggtgtggtggcgcatgcctgtaatcccagctacttgggaggctgaggcaggagaatcacttgaacctgggtggcggaggttgcagtgaggcgaggtcacgccattgcattccagcccaggcaacaagagtgaaattccgccaattaaaaaaaaaaaaaccgtaaaacaaaaaaagatatcagtaggagaaataaagagaataaaactgcccattattagtctatgacatatctatatcaaaaacccaggatgtagaaggcagcacaagataacagaatagaaggctccaccaaccatccctccaacaaggacaccaatttaacagctacacacaaaaaagcactttcccaagaaccaaaaatcccagccgggagcagtggctcatgcctgtagttccagctactcaggaggctgaggcaggagaatcacttgaacccgggaggcagaggttgcagtgagccgagatcgcgccactgcactccagcctgggcgacagagcaagactctgtctccgaaaaaaaaaaaaaaaaaaaaaaaaaaaaaaaaaaaaaaaaaaaaaaaaaaaaagaagaaccaaaaatcaggtgagcactcacagtacccggttttaactttatatcactgaaagacacactgaagaaacacactgaaagtcctgaatctctgacaccacctctccgccacccctggcagcatggtgtggagagtgcctttgtgtgttggggagagggagggggcagcaattgtgaggcatggaacccagcgctgtccttttagagcagaaagaaaaacccgaccacactcagctgatgcccacccatagagggtgtgggcggcaagccacccaggtgccgaggcaagagactgagggcacaagttgttccagtaaaataaaaaatatatataaaataaaaatagttacaccagaagacaagagtgcgagccctctgttatgcccggacagggccactagagggctccatggtctagcggtaatgccggcgcctgggaaggcacccgttacttagcagaccgggaaagggagtctccctttccttgggggagttagagaagactctgctccaccacctcttgtggaaggcctgacatcagtcaagcccccaccatccccacctgccaacagccatccagaggcctaacagtctagcctctgtcatgctgtgcttcagcggtcacgctcctgtttcactttcatgttccaccctgtacacctggctctgccttctagaaaacagtagcagaattaagtgaaagtattaagccgttgacctctccaagaaataatgacataagctgtcccctctctctgcctcggctaccaaacagggaagggccccctgtccagtagacacatgactcacgtgaccttacctatcactggagatggctcaacactccttaccctgcccccttgccttatatccaaaaaataacagtgcagccaggcattcagggccactaccggtctctgcgtcttggtggtagtggtcctccaggccccagctgtctttccttctctttgccttgtgtctttatttctacgatctctcatctccacacacgaggagaaaaacccacaggccctgtagggctggtccctatagagggggcatttaaaccagccctaacaagagggaaattatggatcccagtggaatttgagttcctgcaaactttgcgacccaccatgggctaaagtgctctgggtctctaagtaaatttgaaagtcagtctaggctatcagtgcaactcctaggcaagtcctagtgaggtagaagataagatttgacttcagaggtggggctcagacaccagaccatattgaggactagctaaaacaggtgaaggaaaagggagggggaagcagctttcgatgagacatgcctgccagtgtgccgtgtcaatttcacattaccatgctaacatcaaggaattactgcccctttccaggcaatgccccaatgattagtacccccttccctaaaagtttctacataaactgccccttaatctgcatgcgattaaaagtgggtatatgccaggcacagtggctcacgccagtaatctcagcactttgggaggctaaggcaggtggatcgcttcagcccaggagttcaagaccagcctggccaacatgtcaagaccccatctctgctaaaaatacaaaaactggcggggcagggtggctcatgcctgtaattccagcactttgggaggttgaggaggacagatcacaagctcaagagatcgagaccaccctggctaatgcagtgaaaccccgtgtatactaaaaaatacaaaaaattagccaggcctgatggtgggcacctgtagtcccagctactcaggacgctgaggcaggagaatggtgtgaacccaggaggtggagcttgcagtgagccaagatcgtgccactgcactccagcctgagcgacagagtgagactccatctgaaaaaattagccaggcctgctggtgcccgcctgtagtcccacctacttgggaggctgaggcagaaaaatcactggaacccaggaggcggaggttgcagtaagctgtgatcacgccattgcactccagtctgggcaacatgagcgaaactccgtctcaaaactaaaagaaaagatgaagatgaaaagaatacctttatggaaaaatataaaatgcaaaacttgcaccaagaggtaccaaaaaactttactaaatccataaatattaatgaaatggaaataacttgggggagggggcagacaatatggttcatgcctgtgatcccaacattttgggaggctaaggtagacagatcacttgaacccaggtgtttaagacccatctggtcaacatagcgaaacctggtctctacaaaacaatttaaaaattaggccgggcgcggtggctcacacctgtaatcccaccactttgggaggccgaggtgggtggatcacaaggtcaagagatcgagaccatcctggctaacatggtgaaaccctgtctctactaaaaatacaaaaaattagttgggcgtggtggcgggcacctgtagtcccagctactcgggaggctgaggcaggagaatggcctgaacccgggaggcggagcttgcagtgagccgagattgcgctactgcactccagccttggcgacagaggaagactccatctaaaatttaaaaaataaaaataaataaaaattagctggatatggtggtgtgtgcctgtagtccccactactcgagaggctgaggctgaaggatcgcttgaacccaggaggtcaaggctatagtgagtcatgatggtgccactgcactccagcctggttgacagagggagaccctgttgaaagaaaaaaatgagagaaagagaggaagggaaggggaagggaagaaacaaactaccttccgctaaaggacaaaacccagaggatttttcaaccaaagtttttggggtttttttttttttttttttttttagacggagtcttgctttttttttttttgagacagcgtctcgctccgtcgcccaggctggagtgcagcggcgcgatctctgctcactgcaagctccgcctcccaggttcacgccattctcctgcctcagcctcccgagaagctgcgactacaggcgtccgccaccacgcctggctaatttttttctatttttagtagaaatggggtttcaccatgttagccaggatggtctcgatctcctgacctcgtgatctgcccgcctcggcctcccaaagtgctgggattacaggcgtgagccaccgtgcccggccccaatcaagttttatcaacatttcaagtaacagttatttctcatctaattcaggctgataccaagaagagggggagggaaaaaaaagagggaaagggggagaatatccaatttcttttatttttaaattttttattttggagacagggttttgctctgttgcccaggctggaatgcagtggtgtgatcacagatcactgcagcttccaacacttgggctcaagcaatcctcctgcctcagtcttcccagtagctaggatgacaggtgcacacaaccacacccagctaatttttttatttttggtagagattaggccttgctatgttgtccaggatgatctgaatctcctagcctcaaaccatcctcccacctcggcctcccaagcactaggattacatgtgtgagtcaccaaaatgagtacagggcttccttttggggtcatgaaaatattctggcagtagatagatatggttgcactgcactgtgaatgtaccaaatgccactgaatcattcacttcacaatggttaattttatgttatatgaatttcactttgataaaaacagatgtggccgggcacaatggctcatgcctgtaatcccagcacttgagaggccaaggccagtcgatcacctgaggtcaggagttcgagaccagcctaaccaatatggtgaaaccccatctcgaatctctactaaaaatacaaaaattagccaggcatggtagcatgcacctgttgtcccagctacaggaggctgagacagaagaattgcttgaacctgggaggtggaggttgcagtgagccaagatcacaccactgcactccagcactccaggttggatgaccgagcacaactccatctcaaaaaaaaaaaaaaaaaaaaaaaaaaaaaaagaggaggccaggcactgtggctaaattctatcatcccagccctttgggaggccaaggcaggtggatgacttgaggctaggagcttgagaccagcctgggcaacataatgagaccccatctcacaaacaaaaaagatttcttggccaggaatggtggctgacgcctgtaaccccagcacttttgagagtctgaggcaggtggatcacaaggtcaggagttcaagaccagcctagcaaacatagtgaaaaccccatctctactaaagatacaaaaaattagctgggcgtggtggcacgtgcctgtaatgccagctactcgggaggctaaggcaggagaatcactctaactcaggaggcagaagttgcagtgagctgagatcacagcaccactgcactccagcctaggcaacagagcgagactctgtctcaaaaacaaaaaacaagaacaaaaacaaacaacagttctagagatgggtggtggtgatgagtgcacaacattgtaaaaatactgaatacctttgaagcccactttaaaattgttaaagtggtcaattttatgttatttttaggtataatacttacgtactttttgtatttttttctattatgtattgatatgtatatttaacagtagaaaaaaaatgatggtcactcgatcggaaacagaaaaggttaaagcaaaagtaaaatgcatgaaaaccagggagaactgccagataagcacatggtcagtgaccctggattagcccgaggctgactgggtgttggacatggggaacgaccaccacctaggggcaacttgccatctgccgctatgttctttctgggacttggaaaaacatgcattactaggaacttcccctactgttattccctgtttcccccgccaccccgcccgagacagagtcttactctgtctcctaagccggagtgcaatggccgatctcggctcactgcaacacccgcttcccgggtccaagcgatcctcctgtctcagcctcctgagaagctgggattataggcacaggccaccatgcctggctaatgtttgtatttttagtaaagacgggatttcgccacgttggtcaggctggtctcgagctcctgacctcaagtgatccgacagccttggcctcccaaagtgctgggattacagacgtcagccaccgcacccggcctgttatttcctcttaatactgacatcatcctcctgtttaccaatctttgtcacagaccaggtggcatctctgagaaaacagaaatcagcaggagagaccttccagagccactgccctccatcaacctgcagacctgcatcaggacccagacgcagtggctcttcctcttgccctgtgagaatcaatttgccctggatgcagcaaaaccacgcccccttctccaccaactcctccaccccttcatgggcctagacaagcacctacctcaacaacctccccgcacccctggagcattcctatcagcacacaaataggttgatgcatttttccctcctttgtttttattattaaggtgaaactcacacggcataaaattaacctttgttttttttcctttttttttttttgagactgagtctcgctgtattgcccaggctggagtgcagtggcgcgatctcggctcactgcaacctctgcctcccaggttcaagcgattctcctgcctcagcctctcaagtagctgggaccacaggctcgtgccacgacacctggccaattattgtatttttagtagagacagggttttgctatgttggccaggctggtctcaaactcctgacctcaagtgatccacctgcttcagcttcccaaagtgctgggattacaggtatgagccaccatgcccagccccttctttttttgagagagagagagagagacacagacagacagagtctttgtcacccaggctggagtgtagtgactcgatctcagctcaccacaacctccaccgcccgcctcagcctcctgagtagctgggactacaggcacacgccaccataccctgctaatttttgtattttttgtacagaaagggtcttgctatgttgcctaggctggtcttgaactcctggcctcaagggatcctcctgccttgacctctcaaattcattttcttctgagggcttctattccatgcaaaacttctattaagtaaatctgtatcctctcctgttaacctgtttttgtttgttttgttttctgagacagtcttgctctgtcacccgggctagaacacagtggcacaatctcagctcactgcgacctccgcctccagggttcaagcaattctcctgcctcagcctcccgagtagctgggataacaggcaccagccagcacgcccagctaattttttgtatttttagtagagatggggtttcaccatgttggccaggctggtctcaaactcctgacctcgtgatttgtcgacctcgtgatttgcctgcctcggcctcccaaagtgctgggattacaggcgtgagccactgtgccatgcctggccctatttttttttttttttttttttttttttttttttttttttttggtagggggagatggagtttcctcttgttgcccaggctggagtacagtggtacaatcttggctcaccacaacctccgcttcctgggttcaagcaatttcctgcctcagcctcccaagtagctgagattacaggtgcccaccacgacacctggctaatttttgtatttttagtagagacagggtttcaccatgttggtcaggctggtctcgaactcccgacctcaggtgatccagctgccttggcctccaaaagtgctggaattacaggcgtgagccaccacgccctgcctgttaacccattttatgtcaacttaataattctcaggcctagagggatcctaagagaacagaggtgaatttttgctgccggacctgctgctatgaactttaatctatgagtttttttttttttctcgagttagtatcttgctctgctgcccaggttggagtgcagtggcaagatcagggctcactgcagcctcaaccttctggcctcaagcattccacctagttcagcctcctgagtagctgggactacaggcaggcaccaccacacccaaataatttttgtatttcttgtagagatgaggtctcactatgttcccaggctggtctcaaattttcgggctgaagtcatccacccaccttggcgtctcaaagtgctgggattacaggcgtgaaccatcacgcccaaccctttttcctttttaagatacagcagggtctcactctgttgccctggctggagcacagtggtacaataatagctcactccagccttgaccaccgggactcaagcaatcctcccatctcagcctcccaactagctaggattaaacatgtgagccaccatgccccgcttccatctctttttcattttgtcttgtttttttttttgtacagaatattgctctgttgcccaggttggagtgcagtggcatgatctctgctcactgcaaccttctcccaggttcaagcgattctcctgcctcagccacccgtgtagctgggattacaggcacccgccaccacacccggctaaatttttcatttttacaagagaccgggtttcaccatgttggccagggtggtcttgaactcctgacctcaagggatctgcccgcttcaacctcccaaagtgttgggattacaggcgtgagccaccgcacccaacttttcatctgttttctgattcttccttagctccaaaacatctaaggtttggctgcattcactcctctccagcccacagacgcccaactgggccaattcccaaattcatcattctagcccaaaccctagggtccagtgccttctcagcctctgccacaaggggtcctcgcaggccgctccagtgttgcaggtcccaatctggactcctaggggtttcccacccaagccttgtccgagcgtcctctccctctcagttagcaccatcttcccaggctctgctctgacagttctgaggcatccacgcctcctcccacctgcatccaatgtgtctgccaatcctacagcccccatcgccttttccttcaaaacagacctagaagccagttatcactgaccacctgcacttgccagctaggtccagccccttcctgacttctggggatcagtgcagttgtcccctccctggtctccctgcaggttctgttctccccactgcaaccagaaacaccttctctttttttttttttttttttgagacagagttttgctcttgttgcccaggctggagtgcaatggtgcaatcttggctcactgcaacctccgcctcccgggttcaagcgattctcctgcctcagcctccctagtaactgggattacaggtgtctgccaccacgcccggctaattttttgtatttttagtaaagacggggtttcactatgttggtcaggctggtctcgaactcctgacctcaggtgacccacccacctcagcctcccaaagtgctggaattacaggcgtgaaccaccacgcccagctctttcgttttcttttgagacagagtctcgctctgtcgccctggctggagtacaatggcatgacctcggctcactgcagcctcttgcctcccaggttcaagcgattctcctgcctcagcctcctgagtagctggaattacaggcatgcaccaccatgcctggctagttttgtacttttagtagaccgggttcgaccatgttggccaggctggtctcgacctctcaaagtgctgggattacaggagtgaatctccgcaccagctttttttttttttttttttttttttgagacaggaacttgctgtcacccaggctggagtgcattggcggatttcggctcactgcagcctctgcctcccaggttcaagcaattcttctgcctcagcctcctgagtagctaggattacaggcatgcactacaccacatccagctaatttttttttttttttttttaaagacagtttccctcttgttacccaggctggagtacaatgacaagatctcggctcactgcaacctctgcctcctgggttcaagcagttctctagcatcagtctcccaagtagctgggattacaggcgcctgccaccacacccagctaatttttgtatttttaggagagacagggtttcaccatgttggccaggatggtctagaactcctgacctcaggtgatctgcccacctcagcctcccaaagtgctgggactacaggcatgaaccagtgcacccagctactaatttattttagtagagatggggttttgccatgttgtccaggctggtctcgaactccagtcctcaggcgatccacctgccttgatctcccaaagtcctgagattacaaatgtgagccaccgggctcagccctattttttcagggctattttgttcatggttagaaccaggaacagcactgatacatagtagcattcaacagatatattttattgttgttttctagagacaggatcttgctccattgcccaggctggagtgcaatgggtgatcatagctcactgtagcctccatctcccaggctcaagcaatcctcccacctcagcctcctaagtagctgcaactacagaaacttcaggtatgtgccaccatgcccagctattttttttgttttttagtataaatgagatctcactatattgcccaggctgatctccaacacctgggttcaaacagtcctcatgcctcagcctcccagagtgcttggataacaagtgtgagccgctgcacctgaccatcaacaagtatcttttttaaccagcttttaccagtcggggtctggccatgttgaccaatctgtatgaaacatttttttgttttgttttaaattagctgggcacagtggcgcagacctgtagtcccagctaatcaggaggctgaggcgggaagatctcttgagcctgggaggttgaggctacagtgagctataattctataactgcaccaccgtactccagcttgggagccaaagcaagaccctgtctctaaggaagaaaaaaatgaaaaaaagagtttctgagctatcatactagcttcagtttgctagggtggccataacaaaataccacagcttgggtaggttaaaaacagaaacttacatttctggaggctgacgtccaagattaagatgtcatcagggttggtttctgcttttcatttttgaaacggagtcttgctctgctacctaggctggagtgcagtggcaccatcttggttgcactgcaacctccacctcccagattcaagcaattctcgtgcctcagcttccagagtagccccaggttcaagcaattctcgtccctcagcttctcgagtagctgggattacaggcgcccaccaccacgcccggctaatttttctatttttagtagagatggggttttgccgtatttccgggatggtctctaaatcctgacctcaaatgatcacgcctgggattacatgcgtgagccaccgcacccggcccagagctggtttctactgagcccccttgctttgtcttacagagccgcggccgcctcctgcgtgccctcacatgctctcttctctgcatgcacccttcgtatttcttagtgtccatatttcttcttcttgtagggacaccaggcagattggatgaggacccgatgtagcagtgtatccagaattggtggggtcttggtctcactgacttcaagaatgaagccacagaccctcgtggtgaatgttacagttcttaaaggcagcgtgtccacagtttgttccttctgatgttcggatgtgttcgtagtttcctccttctggtgggttcgtggtctttccggctcaggagtgtagctacagaccttttgcagtgagtgttacagctcataaaggcagtgtggacccaaacagcgagcagcagtaagacttattgcaaagagaaaaagaacaaagcaaccacagcatgaaagacaacccaagttgccactgctagctggggcaacctgcttttattcccttatctggccccacccacatcctgctgattggtccattttacagagagctgacaggtctgttttacagagagctgattggcccattttgacagggtgctgattggtgtgtttacaatccccgagctagacacaaaagttctccaagtccccacagagcactgattggtgcatttacaaaccttgagctagacacagggtgctgactggtgtatttacaaaccttgagctagacacagagtgctgattggtgtatttacaatcccttagccagacataaaggttctccaagtccccaccagattagctagatacagagtgctgattggtgcaattacaaaccctgagctagacacagggtgctgattgatgcatttacaatccctcagctagacataaaggctctccaagtccccactagactcaggagcccagctggcttcaggcagtggaacccgcagggggtcagaggtagagctgcccaccagtcccttgccacacgcctggactcctcagccctcttggcttgggcagtcgatgggaccaggcgtcgtggagcagtgggtggcgctcatgagggaggctcgggcggagcaggagcccagggcagggggaagcctcaggcatggggggctgcaggtcctgagccctgcccagccgggaggcagctgaagccccgcgagaattcgagtgcagcgctggcgggccggcactgctgggggacccggcacaccctccacagctgctggcccgggtgctaagcccctcaactgcctggggccggtggcaccggctgtccgctctgagtgcgggggcccacgcccacccggaactcgcgctgtcccacgagccccttgcgcacagcccgggttcccgcccgcgcctctccctccacacctttagcaagcagaaggagctggctccagcctcggccagcccagagagggactcccacagtgcggtggtgggctgaagagctcctcaagcgcggccagagtggacgcggaggcccaggaggcaccgagagcaagcgagggctgccagcacgctgtcacctctcagcagcttcttttttttttgagacagggccttgctttgtctcccaggctggagtgtagtggcgctaacagctcagtgcagcctcctggaatcaagcaatcttcccacctcagcctcctgagtagctgggaccacgggtgcacaccaccaagtcctgctaattaaaaaaattttttttcttttcttctttttgagacggagtttccctcttgttgcccaggctggagtgcaatggtacaatctcggctcactgcaacctccgcctctcagattcaagcaagtctcctgcctcagcctcccaagtagctgggattacaggcatgtgtcaccatgcccacctaattttgtatttttagtagagacgggtttcactatgttggtcaagctggtcttgaactcccgacctcaggtgatccacctgcctcagcctcccaaagtgctgggattacaggcgtgagccaccacacttaggctttttttttttttttttttgaaacagactctcactcttttgcccaggctggagtgcagtggtgggatctttggctcactacaacctctgcctcctgttctcaagtatttctcgtgcctcagcctcctgagtagctgggattcaagtgtgcaccaccacaccgagctaattttttgtatttttagtagaggcaggctctccctatgttgcccaggctggtttcaaactgctggccttgtgcaatccacccacctcagcctcctgaagttctgggatgacaagtgtgagccaccacacctggccttaatcacccctttaaagaccctgtatccggcctggcatggtggctcacgcctgtaatcccagcactttgggaggccaaggtgggtggatcacctgaggtcaagagttcgagactagcctggccaacatagtgaaactctgtctctactaaaaatacaaaaattagctgggcgtggtggtgagcgcctgtaatcccagctacttgggaggctgaggcaggaaaatgacttgaacccgggaggcggaggttgcagtgagccgagatcgcgccactgtactccagcctggtggcagagcaagactctgtctcaaaaaaaaaaaaaaagaaattaaccgctgctcacagctgtgctagcttacaggaacaaaggccaagtgccaataaccacaaatgagccacaagatgagagctgacctcagcagtgctccataggcctgattcctcactccactggcataataaaatctccacagccagggtgcactggctcccagctgtcatccaagcactttgggagggtgagaaaggcggctggtctcaaactcctgacttcaagtgatcacccacacctcagcctcccaaagtgctgagattacaggcgtaagccaccacacccggactataacatccattcttttagggagccccagaacctgtgaaattaatctctgctctggccgggcatggtggctcacacctgtaatcccagcactttgggaggctgaggcgggtggatcacgaggtcaggacatcgagaccagcctggccaacatggtgaaacctggtgtctactaaagatacaaaaaagtagccaggcatggtggtgtgtgcctgtaatcctagctatttaggaggctgaggcaggagaaatgcttgaacctgggaggcagaggttgcagtgagccgagatcacaccattgcactccagcctgggcaacagggcgacactctgtctcaaaaaaaaagaaattaacccctgctcacagctgtgctagtttacaggcatgaaggccggatgccattaaccacaactgagccacaagatgagagctgacctcagcagtgctccatctgcctgaatcctcactccatgggcagagtaaaatctccacagccagggcacaatggctccaagctgtcatcccagcattttgggagtgtgaggagggaggattgcttaagtcagagagttcaagaccaccctgggcaacatggtaagaccctctcttggcctgtaatcccagcacttcaggaggccaaggtgggcagatcacgaggtcaggagtttgagaccaccctggccaacatggtgaaaccctgtctctactaaaaatacaaaaaaaaaaaaaattagccgggtgtggtggcacgcgcctgttactactcaggaggctgaggcaggagaattgcttgaacccgagagtcagaagttgcagtgagctgagattgtgccactgcactccagcctgagcgacacagcgagactcagtctcagaaaaaaaaaaaaaagaccctctctctacaaaaaataatgtaaaaattagccgggcgtggtgatgcatgcctgtagtcccacctacttgggaagctgaggcaggaggattgcttgagctcagaaggtcgaggctgcagtgagctacgatcgcaccactgtacttcagcctgagcaacagagtgaggtgctgtttcaaaaaaaaaaaaaaaaaaaagctgggattatatgggtcacacctataatcccagctactcaggaggctaaggcaggagaattgcttgaacctgggaggcggaggtggcagtgagctgagatcgccccactgcactccagcctgggtgactgatcgagactctgtctcaaaaaaagaaaaaccaaaaaaaaaaagtcttcagtggggagaggtgcactttgctaagcacatataatgccaggtacaaaagaaaagaaaggctgaacacttcagtgccccctagaaagccccacctctttccaggaatccccacccccagtctgcatctacatgccctaggaaactttaaaactcccctcatcacacctgcagggagtaggcactttgagcaggagttcctccctttctccattcattgattgacgaataaagtttctatcttgctttactgaacctggtcttgttctgttggtgcaaatggcaacccgcagagaaaggactcattagtctcaaacaatccccttaagagtgggtaacagcggacaccatggctcacacctgtgatcccagtgctttgggaggctagggtgggaggatcacttgagctgaggagttaagagaccagcctgggcaacgtagaaagacctcatctctaaaaaaaaaaaaaaaaaaaaaaaaaaggcagaggggaggggggcgggcgtggtgtctcacgcctgtaacccctgcactttgggaggccaaggcaggcaaatcacctgaggtcgggagtttgagaccagcctgaccaacatggagaagccccgtctctactaaaaatacaaaaaattagccaggcatgatggcacatgcctataatcccagctactcgggaggctgaggcaggagaatcacttgaacccaggaggcaaagtttgccgagatggagccattgcactccagcctgggcaacaagagggaaactccaccaaaaaaaaaaaaaaaaaaaaaaaaaaaaaaaaaaaaaaggcgagggggaggagggagactttaaaaaaagaaaaataaaaaaagttttttttggccaggcactgtggctcacgcctgtaatcccagtactttggaaggccgaggtgagcggattgcctgaggtcaggagttcgagaccagtctggccaacatggtgaaaccccgtgtctactacaaatagaaaacaaattcgcctgatgtgttagtgcaggcctgtagtcccaggtactcaggaggctgagacgggagaatcgcttgaacccgggaggcagaggttgcagtgagccgagattgcaccactgcactccagccaggtagacagagcaaggctccgtctcaaaaataaataaataaataaataaataaataaataatgtttttgagatagtctcaaaagggtgttcaggcccttatgtgttccccccactcacacacacacacacacacacacacacacacacacacacacacaggatctgggctgacctggactccactgaatccacagaatacagcatcggcaacattgacccagcagtctctctgctttgtgtgttggggaaccccaagtcaccgtggcaggagtgtggccaccttgctcaggagtccacgtggagaggccacatggagaggtcagctatcccagacatgacagaccttctggatgggacatccagccagcccggcccccagatgatggcagccactgtcacatggaacaaatgaacccccagtgagcctggtcagcccagagccaggagagaggatgcgacaacaggtgtttggagccagtgggcatggggcggtttgctccactgagaacaagaatgcatgacagtcaggacggtccagagcctagaggtccacttaggtggcatgtggcacccacaccagcctcacagccgggcacacatatccctgacataccctgttgtccgtcgaggctgactcgtgacagagaaaacgttagagaaaaaacctggctggatgcagtggctcacacctgtaatcccaacgctgtggggggccgaggtgggagaattccttgagatcaggtgttggaggccagcctgggcaacatagaccaaccctgactttacaaaaataaaaaattagctgggtgtgatacatgtgactgtaatcccaaaactcgggagactgaggcaggaggatttttcttttttttgagatggagtcttgctcttgtcacccaggctggagtgcaatggcaggatcttggctctctgcaacctctgcctcccaggttcaagcaattctcttgcctcagcctcccaagtagctgggattacaggcgcctgccaccacacccggctaatatttctatttttagtagagatgtggtttcaccatgttggccaggctggtctcgaactcctcacctcaggtgatccgcccaccttggcctcccaaagtgctgggattacaggcatgagccaccgtgcccagcccaggcagatctcttgatcccagttcaaggctgcagtgagctgtgatcacactactgcactccaacctgggcaacaggtccatctgagtccatctctaacggtcccagggaggtcactcccctgcaaggaggctactgtggcccccaacatcccattcagagatttagaagctgaggataagggaggaactttgccctgtcacccagaagtcagggtgtgaattaactttaccggtcaccaacctttttggcagcagggactggtttcatggaagacaatttttccacggaccaggggtggggatggtttcaggatgattcaagtacattacttgtttttgtttgttttttgagacagtcttgctgtgacacgcaggctggaatgcagtggcctgatcacggctcactgcagcctggacctcccaggctcaagcaatcctcctacttcagcctcccaagtagctgagactacaagtgcacaccaccacccacagctagttaaaaaaaaatgtataggccaggcacagtggttcacgcctgtaatcccagcactttaggaggccgaggcgggcggatcacctgaggtcgggagttcaagaccagcctgaccaacatggagaaaccccttatctactaaaaatacaaaattagccaggtggggtggcacatgcctgtaatcccagcaacaagaacgaaactctgtctcaaaaaaaaaaaaaaaaaaaaaatttgcagagatccctatgatgcccaggataaataataaaaccttttttttcttttttgagacagagtctcactctgtcacccaggctgcagtacaatggcgtgatctcagctcactgcaatttccacctcccaggttcaagcgattctcctgtctcagcctcccgagtagctgggattacagacgcctgccaccacacccaaccaattttttgtatttttggtagagacagggtttcaccatattggccaggctgggggggagggaaaaaaaagagggaaagggggagaatatccaatttcttttatttttaaattttttattttagagacagggttttgctctgttgcccaggctggaatgcagtggtgtgatcacagatcactgcagcttccaacacttgggctcaagcaatcctcctgcctcaggcttcccagtagctaggatgacaggtgcacacaaccacacccagctaatttttttatttttggtagagattaggccttgctatgttgtccaggatgatctgaatctcctagcctcaaaccatcctcccacctcggcctcccaagcactaggattacatgtgtgagtcaccaaaatgagtacagggcttccttttggggtcatgaaaatattctggcagtagatagatatggttgcactgcactgtgaatgtaccaaatgccactgaatcattcacttcacaatggttaattttatgttatatgaatttcactttgataaaaacagatgtggccgggcacaatggctcatgcctgtaatcccagcacttgagaggccaaggccagtcgatcacctgaggtcaggagttccagaccagcctaaccaatatggtgaaaccccatctcgaatctctactaaaaatacaaaaattagccaggcatggtagcatgcacctgttgtcccagctacaggaggctgagacagaagaattgcttgaacctgggaggtggaggttgcagtgagccaagatcacaccactgcactccagcactccaggttggatgaccgagcacgactccatctcaaaaaaaaaaaaaaaaaaaaaaaaaaaaaaaaaaaaaaagaggaagccaggcactgtggctaaattctatcatcccagccctttgggaggccaaggcaggtggatgacttgaggctaggagcttgagaccagcctgggcaacataatgagaccccatctcacaaacaaaaaagatttcttggccaggaatggtggctgacgcctgtaaccccagcactttgagagtctgaggcaggtggatcacaaggtcaggagttcaagaccagcctagcaaacatagtgaaaaccccatctctactaaagatacaaaaaattagctgggcgtggtggcacgtgcctgtaatgccagctactcgggaggctaaggcaggagaatcactctaacccaggaggcagaagttgcagtgagctgagatcacagcaccactgcactccagcctaggcaacagagcgagactctgtctcaaaaacaaaaaacaagaacaaaaacaaacaacagttctagagatgggtggtggtgatgagtgcacaacattgtaaaaatactgaatacctttgaagcccaccttaaaattgttaaagtggtcaattttatgttatttttaggtataatacttacgtactttttgtatttttttctattatgtattgatatgtatatttaacagtagaaaaaaaatgatggtcactcgatcggaaacagaaaaggttaaagcaaaagtaaaatgcatgaaaaccagggagaactgccagataagcacatggtcagtgaccctggattagcccgaggctgactgggtgttggacatggggaacgaccaccacctaggggcaacttgccatctgccgctatgttctttctgggacttggaaaaacatgcattactaggaacttcccctactgttattccctgtttcccccgccaccccgcccgagacagagtcttactctgtctcctaagccggagtgcaatgggcgatctcggctcactgcaacacccgcttcccgggtccaagcgatcctcctgtctcagcctcctgagaagctgggattataggcacaggccaccatgcctggctaatgtttgtatttttagtaaagacgggatttcgccacgttggtcaggctggtctcgagctcctgacctcaagtgatccgacagccttggcctcccaaagtgctgggattacagacgtcagccaccgcacccggcctgttatttcctcttaatactgacatcatcctcctgtttaccaatctttgtcacagaccaggtggcatctctgagaaaacagaaatcagcaggagagaccttccagagccactgccctccatcaacctgcagacctgcatcaggacccagacgcagtggctcttcctcttgccctgtgagaatcaatttgccctggatgcagcaaaaccacgcccccttctccaccaactcctccaccccttcatgggcctagacaagcacctacctcaacaacctccccgcacccctggagcattcctatcagcacacaaataggttgatgcatttttccctcctttgtttttattattaaggtgaaactcacacggcataaaattaacctttgttttttttcctttttttttttttgagactgagtctcgctgtattgcccaggctggagtgcagtggcgcgatctcggctcactgcaacctctgcctcccaggttcaagcgattctcctgcctcagcctctcaagtagctgggaccacaggctcgtgccacgacacctggccaattattgtatttttagtagagacagggttttgctatgttggccaggctggtctcaaactcctgacctcaagtgatccatctgcttcagcttcccaaagtgctgggattacaggtatgagccaccatgcccagacccttctttttttgagagagagagagagacacagacagacagagtctttgtcacccaggctggagtgtagtgactagatctcagcttaccacaacctccaccgcccgcctcagcctcctgagtagctgggactacaggcacacgccaccataccctgctaatttttgtattttttgtacagaaagggtctttctatgttgcctaggctggtcttgaactcctggcctcaagggatcctcctgccttgacctctcaaattcattttcttctgagggcttctattccatgcaaaacttctattaagtaaatctgtatcctctcctgttaacctgtttttgtttgttttgttttctgagacagtcttgctctgtcacccgggctagaacacagtggcacaatctcagctcactgcgacctccgcctccagggttcaagcaattctcctgcctcagcctcccgagtagctgggataacaggcaccagccagcacgcccagctaattttttgtatttttagtagagatggggtttcaccatgttggccaggctggtctcaaactcctgacctcgtgatttgtcgacctcgtgatttgcccgcctcggcctcccaaagtgctgggattacaggcgtgagccactgtgccatgcctggccctatttttttttttttggtagggggagatggagtttcctcttgttgcccaggctggagtacagtggtacaatcttggctcaccacaacctccgcttcctgggttcaagcaatttcctgcctcagcctcccaagtagctgagattacaggtgcccaccatgacacctggctaatttttgtatttttagtagagacagggtttcaccatgttggtcaggctggtctcgaactcccgacctcaggtgatccagctgccttggcctccaaaagtgctggaattacaggcgtgagccaccacgccctgcctgttaacccattttatgtcaacttaataattctcaggcctagagggatcctaagagaacagaggtgaatttttgctgccggacctgctgctatgaactttaatctatgagtttttttttttttctcgagttagtatcttgctctgctgcccaggttggagtgcagtggcaagatcagggctcactgcagcctcaaccttctggcctcaagcattccacctagttcagcctcctgagtagctgggactacaggcaggcaccaccacacccaaataatttttgtatttcttgtagagatgaggtctcactatgttcccaggctggtctcaaattttcgggctgaagtcatccacccaccttggcgtctcaaagtgctgggattacaggcgtgaaccatcacgcccaaccctttttcctttttaagatacagcagggtctcactctgttgccctggctggagcacagtggtacaataatagctcactccagccttgacctccgggactcaagcaatcctcccatctcagcctcccaactagctaggattaaacatgtgagccaccatgccccgcttccatctctttttcattttgttttgttttttgtacagaatattgctctgttgcccaggttggagtgcagtggcatgatctctgctcactgcaaccttctcccaggttcaagcgattctcctgcctcagccacccgtgtagctgggattacaggcacccgccaccacacccggctaaatttttcatttttacaagagaccgggtttcaccatgttggccagggtggtcttgaactcctgacctcaagggatctgcccgcttcaacctcccaaagtgttgggattacaggcgtgagccaccgcacccaacttttcatctgttttctgattcttccttagctccaaaacatctaaggtttggctgcattcactcctctccagcccacagacgcccaactgggccaattcccaaattcatcattctagcccaaaccctagggtccagtgccttctcagcctctgccacaaggggtcctcgcaggccgctccagtgttgcaggtcccaatctggactcctaggggtttcccacccaagccttgtccgagcgtcctctccctctcagttagcaccatcttcccaggctctgctctgacagttctgaggcatccacgcctcctcccacctgcatccaatgtgtctgccaatcctacagcccccatcgccttttccttcaaaacagacctagaagccagttatcactgaccacctgcacttgccagctaggtccagccccttcctgacttctggggatcagtgcagttgtcccctccctggtctccctgcaggttctgttctccccactgcaaccagaaacaccttctctttttttttttttttttttttttgagacagagttttgctcttgttgcccaggctggagtgcaatggtgcaatcttggctcactgcaacctccgcctcccgggttcaagcgattctcctgcctcagcctccctagtaactgggattacaggtgtctgccaccacgcccggctaattttttgtatttttagtaaagacggggtttcactatgttggtcaggctggtctcgaactcctgacctcaggtgacccacccacctcagcctcccaaagtgctggaattacaggcgtgaaccaccacgcccagctctttcgttttcttttgagacagagtctcgctctgtcgccctggctggagtacaatggcatgacctcggctcactgcagcctcttgcctcccaggttcaagcgattctcctgcctcagcctcctgagtagctggaattacaggcatgcaccaccatgcctggctagttttgtacttttagtagaccgggttcgaccatgttggccaggctggtctcgacctctcaaagtgctgggattacaggagtgaatctccgcaccagcttttttttttttttttttttttttttgagacaggaacttgctgtcacccaggctggagtgcattggcggatttcggctcactgcagcctctgcctcccaggttcaagcaattcttctgcctcagcctcctgagtagctaggattacaggcatgcactacaccacatccagctaattttttttttttttttttttaaagacagtttccctcttgttacccaggctggagtacaatgacaagatctcggctcactgcaacctctgcctcctgggttcaagcagttctctagcatcagtctcccaagtagctgggattacaggcgcctgccaccacacccagctaatttttgtatttttaggagagacagggtttcaccatgttggccaggatggtctagaactcctgacctcaggtgatctgcccacctcagcctcccaaagtgctgggactacaggcatgaaccagtgcacccagctgctaatttattttagtagagatggggttttgccatgttgtccaggctggtctcgaactccagtcctcaggcgatccacctgccttgatctcccaaagtcctgagattacaaatgtgagccaccgggctcagccctattttttcagggctattttgttcatggttagaaccaggaacagcactgatacatagtagcattcaacagatatattttattgttgttttctagagacaggatcttgctccattgcccaggctggagtgcaatgggtgatcatagctcactgtagcctccatctcccaggctcaagcaatcctcccacctcagcctcctaagtagctgcaactacagaaacttcaggtatgtgccaccatgcccagctattttttttgtttgttttttagtataaatgagatctcactatattgcccaggctgatctccaacacctgggttcaaacagtcctcatgcctcagcctcccagagtgcttggataacaagtgtgagccgctgcacctgaccatcaacaagtatcttttttaaccagcttttaccagtcggggtctggccatgttgaccaatctgtatgaaacatttttttgttttgttttaaattagctgggcacagtggcgcagacctgtagtcccagctaatcaggaggctgaggcgggaagatctcttaagcctgggaggttgaggctacagtgagctataattctataactgcaccaccgtactccagcttgggagccaaagcaagaccctgtctctaaggaagaaaaaaatgaaaaaaagagtttctgagctatcatactagcttcagtttgctagggtggccataacaaaataccacagcttgggtaggttaaaaacagaaacttacatttctggaggctgacgtccaagattaagatgtcatcagggttggtttctgcttttcatttttgaaacggagtcttgctctgctacctaggctggagtgcagtggcaccatcttggttgcactgcaacctccacctcccagattcaagcaattctcgtgcctcagcttccagagtagccccaggttcaagcaattctcgtccctcagcttctcgagtagctgggattacaggcgcccaccaccacgcccggctaatttttctatttttagtagagatggggttttgccgtatttccgggatggtctctaaatcctgacctcaaatgatcacgcctgggattacatgcgtgagccaccgcacccggcccagagctggtttctactgagcccccttgctttgtcttacagagccgcggccgcctcctgtgtgccctcacatgctctcttctctgcatgcacccttcgtatttcttagtgtccatatttcttcttcttgtagggacaccaggcagattggatgaggacccgatgtagcagtgtatccagaattggtggggtcttggtctcactgacttcaagaatgaagccacagaccctcgcggtgaatgttacagttcttaaaggcagcgtgtccacagtttgttccttctgatgttcggatgtgttcgtagtttcctccttctggtgggttcgtggtctttccggctcaggagtgtagctacagaccttttgcagtgagtgttacagctcataaaggcagtgtggacccaaacagcgagcagcagtaagacttattgcaaagagaaaaagaacaaagcaaccacagcatgaaagacaacccaagttgccactgctagctggggcaacctgcttttattcccttatctggccccacccacatcctgctgattggtccattttacagagagctgaccggtctgttttacagagagctgattggcccattttgacagggtgctgattggtgtgtttacaatccccgagctagacacaaaagttctccaagtccccacagagcactgattggtgcatttacaaaccttgagctagacacagggtgctgactggtgtatttacaaaccttgagctagacacagagtgctgattggtgtatttacaatcccttagccagacataaaggttctccaagtccccaccagattagctagatacagagtgctgattggtgcaattacaaaccctgagctagacacagggtgctgattgatgcatttacaatccctcagctagacataaaggctctccaagtccccactagactcaggagcccagctggcttcaggcagtggaacccgcagggggtcagaggtagagctgcccaccagtcccttgccacacgcctggactcctcagccctcttggcttgggcagtcgatgggaccaggcgtcgtggagcagtgggtggcgctcatgagggaggctcgggcggagcaggagcccagggcagggggaagcctcaggcatggggggctgcaggtcctgagccctgcccagccgggaggcagctgaagccccgcgagaattcgagtgcagcgctggcgggccggcactgctgggggacccggcacaccctccacagctgctggcccgggtgctaagcccctcaactgcctggggccggtggcaccggctgtccgctctgagtgcgggggcccacgcccacccggaactcgcgctgtcccacgagccccttgcgcacagcccgggttcccgcccgcgcctctccctccacacctttagcaagcagaaggagctggctccagcctcggccagcccagagagggactcccacagtgcggtggtgggctgaagagctcctcaagcgcggccagagtggacgcggaggcccaggaggcaccgagagcaagcgagggctgccagcacgctgtcacctctcagcagctgctttttttttttttttttttttttttttgagacagggccttgctttgtctcccaggctggagtgtagtggcgctaacagctcagtgcagcctcctggaatcaagcaatcttcccacctcagcctcctgagtagctgggaccacgggtgcacaccaccaagtcctgctaattaaaaaaattttttttcttttcttctttttgagacggagtttccctcttgttgcccaggctggagtgcaatggtacaatctcggctcactgcaacctccgcctctcagattcaagcaagtctcctgcctcagcctcccaagtagctgggattacaggcatgtgtcaccatgcccacctaattttgtatttttagtagagacgggtttcactatgttggtcaagctggtcttgaactcccgacctcaggtgatccacctgcctcagcctcccaaagtgctgggattacaggcgtgagccaccacacttaggctttttttttttttttttgaaacagactctcactcttttgcccaggctggagtgcagtggtgggatctttggctcactacaacctctgcctcctgttctcaagtatttctcgtgcctcagcctcctgagtagctgggattcaagtgtgcaccaccacaccgagctaattttttgtatttttagtagaggcaggctctccctatgttgcccaggctggtttcaaactgctggccttgtgcaatccacccacctcagcctcctgaagttctgggatgacaagtgtgagccaccacacctggccttaatcacccctttaaagaccctgtatccggcctggcatggtggctcacgcctgtaatcccagcactttgggaggccaaggtgggtggatcacctgaggtcaagagttcgagactagcctggccaacatagtgaaactctgtctctactaaaaatacaaaaattagctgggcgtggtggtgagcgcctgtaatcccagctacttgggaggctgaggcaggaaaatgacttgaacccgggaggcggaggttgcagtgagccgagatcgcgccactgtactccagcctggtggcagagcaagactctgtctcaaaaaaaaaaaaaaagaaattaaccgctgctcacagctgtgctagcttacaggaacaaaggccaagtgccaataaccacaaatgagccacaagatgagagctgacctcagcagtgctccataggcctgattcctcactccactggcataataaaatctccacagccagggtgcactggctcccagctgtcatccaagcactttgggagggtgagaaaggcggctggtctcaaactcctgacttcaagtgatcccccacacctcagcctcccaaagtgctgagattacaggcgtaagccaccacacccggactataacatccattcttttagggagccccagaacctgtgaaattaatctctgctctggccgggcatggtggctcacacctgtaatcccagcactttgggaggctgaggcgggtggatcacgaggtcaggacatcgagaccagcctggccaacatggtgaaacctggtgtctactaaagatacaaaaaagtagccaggcatggtggtgtgtgcctgtaatcctagctatttaggaggctgaggcaggagaaatgcttgaacctgggaggcagaggttgcagtgagccgagatcacaccattgcactccagcctgggcaacagggcgagactctgtctcaaaaaaaaagaaattaacccctgctcacagctgtgctagtttacaggcatgaaggccggatgccattaaccacaactgagccacaagatgagagctgacctcagcagtgctccatctgcctgaatcctcactccatgggcagagtaaaatctccacagccagggcacaatggctccaagctgtcatcccagcattttgggagtgtgaggagggaggattgcttaagtcagagagttcaagaccaccctgggcaacatggtaagaccctctcttggcctgtaatcccagcacttcaggaggccaaggtgggcagatcacgaggtcaggagtttgagaccaccctggccaacatggtgaaaccctgtctctactaaaaatacaaaaaaaaaaaaaattagccgggtgtggtggcacgcgcctgtactactcaggaggctgaggcaggagaattgcttgaacccgagagtcagaagttgcagtgagctgagattgtgccactgcactccagcctgagcgacacagcgagactcagtctcagaaaaaaaaaaaaaaagaccctctctctacaaaaaataatgtaaaaattagccgggcgtggtgatgcatgcctgtagtcccacctacttgggaagctgaggcaggaggattgcttgagctcagaaggtcgaggctgcagtgagctacgatcgcaccactgtacttcagcctgagcaacagagtgaggtgctgtttcaaaaaaaaaaaaaaaaagctgggtgcggtgggtcacacctataatcccagctactcaggaggctaaggcaggagaattgcttgaacctgggaggcggaggtggcagtgagctgagatcgccccactgcactccagcctgggtgactgatcgagactctgtctcaaaaacagaaaaaccaaaaaaaaaaagtcttcagtggggagaggtgcactttgctaagcacatataatgccaggtacaaaagaaaagaaaggctgaacacttcagtgccccctagaaagccccacctctttccaggaatccccacccccagtctgcatctacatgccctaggaaactttaaaactcccctcatcacacctgcagggagtaggcactttgagcaggagttcctccctttctccattcattgattgacgaataaagtttctatcttgctttactgaacctggtcttgttctgttggtgcaaatggcaacccgcagagaaaggactcattagtctcaaacaatccccttaagagtgggtaacagcggacaccatggctcacacctgtgatcccagtgctttgggaggctagggtgggaggatcacttgagctgaggagttaagagaccagcctgggcaacgtagaaagacctcatctctaaaaaaaaaaaaaaaaaaaaaaaaaggcagaggggaggggggcgggcgtggtgtttcacgcctgtaacccctgcactttgggaggccaaggcaggcaaatcacctgaggtcgggagtttgagaccagcctgaccaacatggagaagccccatctctactaaaaatacaaaaaattagccaggcatgatggcacatgcctataatcccagctactcgggaggctgaggcaggagaatcacttgaacccaggaggcaaagtttgccgagatggagccattgcactccagcctgggcaacaagagggaaactccaccaaaaaaaaaaaaaaaaaaaaaaaaaaaaaaaaaaaaaggcgagggggaggagggagactttaaaaaaagaaaaataaaaaaagttttttttggccaggcactgtggctcacgcctgtaatcccagtactttggaaggccgaggtgagcggattgcctgaggtcaggagttcgagaccagtctggccaacatggtgaaaccccgtgtctactacaaatagaaaacaaattcgcctgatgtgttagtgcaggcctgtagtcccaggtactcaggaggctgagacgggagaatcgcttgaacccgggaggcagaggttgcagtgagccgagattgcaccactgcactccagccaggtagacagagcaaggctccgtctcaaaaataaataaataaataaataaataaataaataatgtttttgagatagtctcaaaagggtgttcaggcccttatgtgttccccccactcacacacacacacacacacacacacacacacacacacacacacacaggatctgggctgacctggactccactgaatccacagaatacagcatcggcaacattgacccagcagtctctctgctttgtgtgttggggaaccccaagtcaccgtggcaggagtgtggccaccttgctcaggagtccacgtggagaggccacatggagaggtcagctatcccagacatgacagaccttctggatgggacatccagccagcctggcccccagatgatggcagccactgtcacatggaacaaatgaacccccagtgagcctggtcagcccagagccaggagagaggatgcgacaacaggtgtttggagccagtgggcatggggcggtttgctccactgagaacaagaatgcatgacagtcaggacggtccagagcctagaggtccacttaggtggcatgtggcacccacaccagcctcacagccgggcacacatatccctgacataccctgttgtccgccgaggctgactcgtgacagagaaaacgttagagaaaaaacctggctggatgcagtggctcacacctgtaatcccaacgctgtggggggccgaggtgggagaattccttgagatcaggtgttggaggccagcctgggcaacatagaccaaccctgactttacaaaaataaaaaattagctgggtgtgatacatgtgactgtaatcccaaaactcgggagactgaggcaggaggatttttcttttttttgagatggagtcttgctcttgtcacccaggctggagtgcaatggcaggatcttggctctctgcaacctctgcctcccaggttcaagcaattctcttgcctcagcctcccaagtagctgggattacaggcgcctgccaccacacccggctaatatttctatttttagtagagatgtggtttcaccatgttggccaggctggtctcgaactcctcacctcaggtgatccgcccaccttggcctcccaaagtgctgggattacaggcatgagccaccgtgcccagcccaggcagatctcttgatcccagttcaaggctgcagtgagctgtgatcacactactgcactccaacctgggcaacaggtccatctgagtccatctctaacggtcccagggaggtcactcccctgcaaggaggctactgtggcccccaacatcccattcagagattcagaagctgaggataagggaggaactttgccctgtcacccagaagtcagggtgtgaattaactttaccggtcaccaacctttttggcagcagggactggtttcatggaagacaatttttccacggaccaggggtggggatggtttcaggatgattcaagtacattacttgtttttgtttgttttttgagacagtcttgctgtgacacgcaggctggaatgcagtggcctgatcacggctcactgcagcctggacctcccaggctcaagcaatcctcctacttcagcctcccaagtagctgagactacaagtgcacaccaccacccacagctagttaaaaaaaaatgtataggccaggcacagtggttcacgcctgtaatcccagcactttaggaggccgaggcgggcggatcacctgaggtcgggagttcaagaccagcctgaccaacatggagaaaccccttatctactaaaaatacaaaattagccaggtggggtggcacatgcctgtaatcccagcaacaagaacgaaactctgtctcaaaaaaaaaaaaaaaaaaaaaaatttgcagagatccctatgatgcccaggataaataataaaaccttttttttcttttttgagacagagtctcactctgtcacccaggctgcagtacaatggcgtgatctcagctcactgcaatttccacctcccaggttcaagggattctcctgtctcagcctcccgagtagctgggattacagacgcctgccaccacacccaaccaattttttgtatttttggtagagacagggtttcaccatattggccaggctggtctcgaactcctgacctcaggtgatccgcccacctctcggcctcccaaagtgctgggattacaggtgtgagccactgtgcccggccaaaacgcagtctctaaaaacataattaaaaaataattaaaacagggtgagtctgagaccatcccaggaaacctggcttccactgcactgaggaggaagccacagtgggtgggggtccccagacctgggaatgggaaggcactgcccaagctctgctcttcttccaagaatcctgatgttaacgcagactccccaccccagccctgctgcccctgctcccaaaaagcaagcagcacagtagctgcacacagggctgggtgtccatgtcccaccttctatgggctgggctctcatggaggaggggctgcagcagcgaccccaggctgcccaggccaagggagacagagacccagaggcaggcggaggatgtgaagcaactttaattgccaccctcagacggggcagcaggagtgtcttaagcacagggccgttctaccccctgggagctgcctggggccagcccctcagttctggctgtggcaggttccccatcctagctccccggatctccatagggagtgtccagggaccctcaatctccagggccacttctgcaggagctcgggttcgaggttccacgtggccagaagagctcaggtctctgagggctggtgtgcccgggtacccatccgcatcactgctctcctcctgtccggctacgcccagggctgagtgacggtggtggcaagtgcttgtcctcagggcagcgaggtcttctgttctgacagcagcagggactccttcatggccaccagtaaccccagtgggcggaggcgctcctgggctcggagccaggacaaaaggaggagggtggcggtgaccaggcttgcactgagcaccgctgtggggaacagatggacagaggagtaaggagggggaaggcaagagcccccacacccaccaagctccatacacatggggatgggagttctgcagctcatccctccccacccacctcccctgaatccccggagctctaagcccccagcatgggagggtaagtccctcttaccagcagctgcaataaccccataggcagttgggcttccagactggtctccggcagaggaggatgtggcattcccgacagaggggacactctccagggtcacagggggccccatggttgtggcattcctgagagaggtgacactctccagggtcacagggggccccatggttgtggcatccccttccgggaggatctcattggttcctgcaataagcccaggcgttcagtagttgaggagagagcactgaaggcgtgagggggccagatgcccaggggagcccttggggtttatcctcaaccaaccaggctgggtgaagctgactgcccgtaattatgtctttttttttttttttttttggagagggagtctggctctgccacccaggctggagtgcagtggcgcaatattggctcagtgaaacctctgcctcctgagttcaaacaattatcctgtcttagcctcccgagtagctgggattacaggtgcacgccaccacgcctagctaacttttgtatttttagtagagacaggatttcgccatgttggccagactggtctcgaacacctcacctcaggtgatctgcctgcctcggcctcccaaagtgctaggattacaggcgttagccaccgtgcccggccttttttaaatttttttgagacagagttttgctgtcacccagactggtgtgcagtggcccaatctcagctcactgcaacctctgcctcccaggttcaagcggttctcctgactcagcctcctgagtagctcggattacaggtgtgtgccaccatgcccagcaaatttttttgtacttttagtagagacggggtttcgcagtgtttgccaggcaggtctcgaaatcctgacctcagatgatccgcccacctcagcctcccaaagtgctgggattacaggcgtgagccaccgggcccggcccctaatgatgtcttgattcccccacagggatgcaggcacgggcaaaggcatgtgtccacgcccccagcctggccacgccccagcaggcagtgggtgtccccatctacccacgagtccaccccagccccgcaggtgcataccacagccgagctcgtcgctggagtcgggacagtctgggtggccgtcgcagcgccacgtgagtggaatgcagtcatcgctcagcgtgcaacggagctcgcctgctaggcaggccaggcggctgcagttgcgcagtttcttgtcagttcccccagagcagtcactgacgccggtgcaggggcaggggaggccagggggcggtgggcattgccctttctgggtacatggctcaatccctggggcacagggttggtcaggtcccaaatgcccacccaagaaggcccaggtactccctgaaaccccatcccctgcaagccccaccctctaagaacagctgagcccaaaaaaatgctcccttcctaaggctccgccccctgcaactgttaactccactttctaaggacaggcctccctgcaagctcttcccctgagaccccactagctctaccttcctacaagcccactttattctatttgtttgtttgtttctttctttattttttcttttgagacggggtctccctttgctgcccaggctgcagtgcagtggcgcaatctcgactcactgaaacctctgcctcccagggtcaagtgattctcctgccttagcctcctgactagctgggattacaggggcctgccgccacatccagctaacttttgtatttttagtagagatggggtttcactgtgttggccaggctggtctcgaacgcctgacctcaagtgatccgcctgccttggcctcccaaagtgctgggattacatgtgtgagccaccgtacctggctccctccctctctctttccttcctttctttcctttctttcatttttcttttttttttctttttctttttttttcctgagacagtcttactctgttgcccaggctggagtgcactggcacaatcctagctcactgcagcggcaacctcccaggatcaagtgatcgatcctcccaccctagcctcccaaagtgctgggattgcaggcgtgagccactgcgcccagcccaagcccatcttagaccccgcttcttatgacccacagacccaagtcgcacccatccctgcggccctgcctttcccacaagctccacctccgcgtgcctggcccctgacaaaccaccctcaggccccgccccctgtaagccccgccaaggggcgtggccactcactgcactcctcctcatcgctgccatcgctgcagtccaagtccctgtcgcagcgccaggtgaggggcacgcataagccactggtgcggcactggaacttggtgggtgggcacgagcctgagctggggcctgcgagatggatgcaaatgaagcctgggaagctggaggctggacctttctccaagagcacagtagtcactggctgtgatccgcaggagacaggcgaagtcccgggatataggaaccacactggcggctgcttgttactgagcccctagtacgagtggggttcagagtgtagcagttcctgggctcaagagccccactgggcaggtgctactgcactccccaggttacagagaaaggaaccaagaggaggccatacagctggtggcagaggctgggtgcagtggctcacgcctgtaatctcagcactttggcaggccgaggcaggtggatcacttgaggtcacgagttcgagaccagcctggcctacatggaaaccccgtctctgttaaaaatacaaaaattagccgggcgtggtagtgcacgcctgtaatgccagctactcgggaggctgaagcatgagaatcgcttaaacctgggagatggaggttgcaatgaaccgaaatcatactgctgcactccagcctgggcgacagaacgagactccgtcaccacaaaaaagaaaaaaaaaagagctggtagcggagttgggcttcgaactcaggtctcgctgatcccagagtcttcaccaggctcctcatagcgagatgatctgccagggagacctccaaactcagtggttaaagagactgagggacgggccatttttccacatgccctgggtcaggctcccgggctcaggtcagcagggagggtctatctcctctgcgtagcaaaagggaaactgaggcagtgggtgggaaactgaggcactgggtagaaaatctgctcagtcaccaagtcctgttgccccgcctcctgaattcctcccagacctatcactctccccatcctaaatgtgtcagctcctcaccagagccccaggccccaggccccaaggtccattaggacaccagagacttgcctttccctctctcctccctacaccctgtgttttcccctcaattttcagatctcagctgatttcctgggagggttctcatgtccctcttggagacctaggaagcactgcctcccatgtctaacaactgtccttaaagccctggtcatgcctgtccacccacagactggacattctgtggaggtcagggctgtgacctggccgcctaaacccagggcagtgcctgattataagtggacacaggtcacataagggtccaagctgggtccagagaagatcccggctgtcctagattctgagcagggaagctcagctgcttgccgacctggaggggcacggaggggcccgcaacctgggccaagggacagaggaagggagtggcctttacggcttcctcctgggtgcggccaggggaggtggcaaatccgccaccctggcttagcttcactctgccaaggcctttaacctcttccacctttacccaccagccatgagcctccaaccccccactccccactgccagcccctcctcggccttcaggcctaattgcacctacttgccacagggtccctgagctctatggatcccagaagagctgtggacaaaccggtgcctgcttccttccccgcccccgggagatctggcagcctccaggtgtggctctccacccaggcgcagacttccacagccctgacacctctgacctcccttcgctggactgcgggagtgtgtatccctctgcaaagtggacagtagagcacagcagtccccgcctcatagggtgtaagcctgacaggagttacagtgaccagtgactttctctcctggcctcagtttcctcacctgtaaacggggtatgctgggaatccctacctcaacatcctgagaaaaaagagactgtgtatagagttttgtcctgtaatcccagcactttgggaggctgaggcggacagaacacttgaggtcaggagttcgagaccagtctggccaacatggtgaaaccccatctctactaaaaatacaaaaattagccgggcatggtgacggtgcctgtagtcccaagctactcgggaggctgaggcatgagaattgcttaaacccgggaggcggagggtgcagtgagccaacattgcactgcactccagccagggcgacagagggagactcaaaaaaaaaaaaacaaaaacttttgtacttggttaacgtgaacgctgcctccttaaaaaaaaacaaacaaaaaaaaacccaggaacatttaacgtgaatgtcagggactttgggatgagtccagggacctagaagtgcggaatgcacaaaggagctgggaaagtgtgtgagcctgagcccagggctgcaagttgggagtgcctgagtgcacagggaggccactccaaccctccagctgcctctaggggtatcagagagggagcccgtccccactggccaccaatacctcttaggccagggcgaacacgtccacgggggtatattcaacttgtgaccccagtctctgcgagagcctgcagtagcatgggggggagagacctcgcgttctctaaggatggaggacaaaggaggagagactgggagggcagggacggttgcggaacggtcacaaggcctgggcgcgagggtttggaaggcaaaggtgcgagaggcaccaggtgacccgtcctgcgtgattagcggtcggacaatctgagcctgctaagagctttcctgaccacgctggtatgaagggcggcttggaggtgacaatgggggacgacagggcacagcaggtgtggagacggtgtgcagggccggagcaaaaccgttaaaggcaggtggagacaccctcctcccctcccccagcatggggtcttcctagcaccagtgcgcgccttcccacaagcgatgaagtccaagtccacgtgctgggggagtgtcatgaactgacgtgcggtgcagccagtgactaggcgttgtcggtgcgcggcggcggggcgaagcctcgcgaggggtgggagcccgcgctgcggggcgtcactcacctgcggcctgggcagaggtcggggtggaaagcgggctcgcggcggcctccaggcctagtccgaggccgagcagcagcagcagcgccaggcccagagcccctgttcgccacgctccaacctgcgccatccaaccgccgctcatgctgtccccacagcggcgccggccacgcgctgtccagaccgctctcttatccctgcgcacgcgcacgcgcggggttggggcggggcccaagcccctgagttctgcggcgcccgcggctacgcgtaccgtaaatgtcagaatagcagggaaaagagaattagaggcccgtccccactttccccagtgaccagatcagttgaaaggtatggagcccgcttgaagttagaaacttctggggatgggaaggaatttgttggtgttcatttgcattatttcccgttccaaatgaggactgctgcaaatgttactgcctcgtgatcttctttaatatggcagccacgcccctcaggcactccgcatttcctccctcatcccactgcttttgtggcgccgacaggtaatttattttatttacttattctggtttgttgtccgagtccccatagaatgctagctactggagggcagggatcttctgttgctcactgctttattctcaggatctgacacatagtgcttgactcatagtaggctcttagtaaacatttggtgagtaaatgaataaatgaaacgtccattctcggagtcgggttgcttgggggggaaaaaggaaaggaaatcaattaattaattaaatttaataataaaggccgggcgcggtgggtcacgtgtgtgatcccagcattttgggaagcagaggcgggcagatcgcttgagcccaggagttcgagatcagcctgggcaacacagcaagtccccgcccgcctcaagaaaaaagaaaattagctgggcatggtggctctaatttgtagtcccagctactcaggaggctgaggtgggagaatcacttggggctgcactccagcgtgggtgacagtgagaccccatttgttagaaaagttggccggcgcgctggctcacgcctgttaaccccagcactttgggaggccgaggcaggcggatcacgaggtcaggagttctaaaccagcctggccaacatagtaaaactcccgtctctaccaaaaatacaaaaattagccgggtgtggtaacatgctcctgtagtcccagctactagggaggctgagatgggagaatcgcttgaacccgggaggcggaggttgcagtgcgccgagaccacatcattgaactccagcctgggtgacagagtgagactctgtctcaaaaaaaaaaaaaagttgtggtcataaaacttggttcagatgccgtcagcggcatgccttgcctagggtcttgccctccttgtggcctctgcacaccctgcctagtctttccttccctcctgacctttctgaatctgattcatccttttgccccaagcagaatcccaccttctccaggaaggtgttagcctttgtaggacccactctgggacactggtacctgctgcctgtagccgtggcctttccccttccagagggcagggcggtctcagcaccctcttggtccacagctgatcttttttagctgctgaagggtctggggctgtgccctggggaagccatgacactcccctgcgtagggtcactgggtggctcctgcagccagacttggacaccctccctttgcagatttctgtctcctccccaggaaccagctgccttccttctggggcgaattcattcttatcccacagccccagcataatgggatctggctcagggaggcctttcctgatctgccctaggtttgccttccctgtgagcagcccttactgtcctctgccttccccgttgagctgcagggtgaccatggtcaagcaggagcctcagtgggaaggtgctgaggaaggttcatgtgagaagtggctgtgggagccctcaagagatggaagttaggccaggcgcggtggctcacgcctgtaatcccaacacttcgggaggcagaggtgggcggatcacttgaggtcaggagtttgagaccagcctggccaacatggcgaaaccccgtctctactaaaaatacaaaaattagctgggcttgtggcaggcgcctgtaatcccagctactcgggaggctgaggcaagagaatcacttgaacccaggaggcagaggttatagtgagccgtgatcgcgccattgtactctagcctgggcaacaagagcgaaactctgtctcaaaaaaaaaaaagaagtgagaagtctgtggctggcctactgagtgtccgcacatacaccccttaccccacctgactggtcttcacaatcaatgctccccaacagccagcggtcctgggagtccaacctcccagaaggatcacccactcccaccactctcaaggtcagagcctggcctttgggggaaagggcagtgctgtctccagggcctctgcacccagggacagtgtctgtcccacccctggagtgccaacagagttgggagactcagcactgacttcaccccaaaatccaagtaagctgggtattgcttaaaatcaggggccaggcgtggtggctcacacctgtaatcccaacactttgggaggccaaggcgggcggatcacctgaggtcaggaatttgagaccagcctggccatctctacaaaaaaaaaaaaaaattagcgggtatggtggtgcacacccgtagtcccagctactcgggaggctgaggcagaattgcttgagcccaggaggcagaggttgcagtgacctgagatcgtgccgttgcgttccagcctgggtgacaagcgcgaaaactctggctcctgcagccagatttctatctcctccccaggaaccagctgccttccttctggagctaactcattctcatcccacagccccagcataatggtttctggctcagggaggcctttcctgatctgccctaggtctgccttccctgtaagcagccctcactgtcctttgccttccccgttgagctacagggtgaccaaggtcaagcagaggcctcagtgggaaggtctaaaaaataaaaataaaatcaggccaggtgtggtggctcatgcctgtaatcccagcactttgggaggtcaaggcaggaggatcgcttgaggccaggagttcaagatcagcctgggaaacatggtgagactctgtctctatttttttattttttaaagtaaaactagaagtgatacctgagctctacgtatttgtcataaattaggtcacattctccctggaggaaatccaaggaggcaaagtagtcgggtggccgtgagggtgcagtgtcacaggtaaggctggtccgaggacagctcccacctctttatgggaggagctggagtcaccgccttcttctcagtggcagctacagcagagctggaggagggaaagacttcagtgagggtttccaaagaacagtgtggaaagatctgagggagcccacacctgccccgggacaaacacacccacagggactttctggacctgcaggacagacagcagggtgttccagaatgccaacccctccaacgcagcccctcagaggatcagccaacgccaggtgggagctagcaagcctcctctctcccctgagccctgtatgaaccccctgctgtggcccccaggcccagaacccactgtggagagctgggctcctcccttcccacttttggtctccagcgtacacaaggcccccacccccattcctgctgcccctcaaaacaggatgctggcaaaagggccaagcgatcaggtgacaatggcctccagctattcctgcctcagactgggcaagaactgcatggcaggcgctactgtgtgggcgcagagccaggaagatggggcaccgccctcaggaagactcaggctggtggggctgagaatccatgcgcaaatggcaactgcaaaacgcatctctggcccagagctggccaagagggagcccccaggagaccctgtgccggcaagtccaggacgagcaccctcccctctcaccccacccacctgagcctgtggagctcacacacttcacagcctaagcaagaaaggaagcaggagggtggggtgatggaggaggcgccccaggggtggaggcacaggacctcccaggagcctcaaggaaatggaaaaggcagaagtggcctccctgggaaatgcacacatctctgggggcatggcaaggggctgtgtgggaacaaggtatcttgccacactctggtgctggactccagtgaatcagaaggtgacaacaaggaccactccactgagttccttctttttgagacagactcttgctctgtcacccaggctggtgtgcagtggcacaatctcagttcactgcaacgtccgcctcccaggcttgagtgattctcttgcctcagcctcccaagtaactgggattacaggtgtgcaccatcactcccggctaatttttgtattttctttcttgtttattatttatgagacagggtctcactttgtcacccaggctggagtgcagtggcgcaatctcagctcagtgaagcttcctcgacctcccaggttcaagagatccttctgcctcagcccttcaagtagctgggcctacgggtgcacaccaccacacccggctaatttttgtattttttgtagagatggggtttccccatgctgctcaggctggtcttgaacttctgggctcaagcgatccacccgcctcggcctcccaaagtgctgagattacaggcgagagccacagcgcccctaacttttgtatttcagtagaggcagggtttcgccctgttggccaggctggtgtcgatctcctgacccctagtgatcctctcacctcggcctcccaaagtgctgggattacaggcgtgagctaccatgcccagcctaaaaaatttctaatagagacggggtctcgctgtgttactcaaacaagtctagaactcaagcaatcctcacacctcagcttcccgagtcactgggattacaggcacacaccactgcgcctggcctattcacagagttcttttttttttttttgagacagagtctcactctgtcacccaggctggagtgcagtggcgcgatctcagtgagctgcaagctccgcctcccgggttcacaccactctcctgcctcagcctcccgaatagctgggactacaggcgcccaccaccacacctggctaattttttgtatttttagtacagacagggtttcaacatgttagccacgatggtctcgatctcctgacctggtgatccgccctccccggcctcccaaagtgctgggattacaggcgtgagccaccgcgcccagacctcacagagttttaagtacagagcaggccctgcctgacctcatcacctcccagatctcagcacactgcaagtctagcatccctattttatatgtgaagaaaccaaggctcaagaaggctgagggactgcccacaccgtgagttggctgtagagcccagaccccaacaggagtccaggaaaactggtttgaaatcctgcttctgcttactgctgcctgtgtggcccaggccagtcacttggcttctgtgagcctcgatttcctcttctgcaagaggggtcatcaccatctaactggtggagttattaggaggtaggcaggacactgactctgtgccaggctccaagagtttacaaatattaattatgaggactaaccctcgtaacagctttctgaagtagatgctattagagtccccatttaattaagagaagacacctgaaaccagggaccaaactgctttttgagaggagcccaaggtttatacacttctgtctctgagaagaatacatggctgggcatggtggctcacacctgtaattccagcactttgggaggccgaggccagaggatcacatgaggtcaggagttcaagaccggcctgaccaacatggtgaaaccccatctctactaaaaatacaaaattagcctggcatggtggcatgcgcctgtaatcccagctacttgggaggctgaggcaggagaatcacttgatcctaggaggtggaggttgcagtgagccgaaatcgcgccactgcactccagcctgtgcaataagagtgagactgtctcaaaataaataaataaaataagaattcataattatatcaacagtaatgtctcagtttctcacaggacccttggagggaccccggacttcatctgttttgtaggatgcagagtcctggctgaggcgctaacttctaccctcccctgggttggactaaatgagctcttgctgagcatggtgactctcacttgtagtcccagctactcgggaggccaaggcaggaggatcgcttgagcccaggagtttgagaacggcctgggcaacaaagcaagaccccatctctacgaaacatttaaaaattaacccagcatggaggccgggcatggtggctcacgcctgtaatcccagcactttgggaggccaacgcgggcagatcatgagatcaggagatcaagaccatcctggctaacacggtgaaaccccgtctctactaaaaatacaaaaacttagccaggtgtagtggtgggcacttgtagtcctagccactaggcaggctgaggcaggagaatggcgtgaacccctgggaggcagagcttgcagtgagccgagatcacaccactgcactccagcctggtgtggggataagaaagagaaatcagattgttaatgtgtctgtgtagaaagtagacataagagactccattttaatctgtaatcttacccccaaccctgtgctccctgagacatgtgctatgtcaactcagagttaaatggattaagggcagtgcaggatgtgctttgttaaacagaagctggaaggcagcatgctccttaagagtcgtcaccactccctaatctcaagtacccagggacacaaaacaccacagaaggccacagggttccctgcctaggaaagccaggcattgtccaaggtttctccccatgtgatagcctgagatgtggcctcgtgggaaaggaaagacctgaccgtcccccagcccgacaccggtaaagggtctgtgatgaggaggattagtaaaagaggaaggaatgccctgttgcagttgagacaagaggaaggcatctgtctcctgcccttccctgggcaatggaatgtctcggtgtaaaacccgattgtatattccatctactgagataggggaaaaccgccttaggcctgaaggtgggacatgcgggcagcaatactgctccttaaggcattgagatgtttacgtgtatatgtatctaaagcacagcacttaattctttacattgtttatgatgcagagacttttgttcacgtgtttacctgctgaccttctctccactattatcctatgatcctgccacatccccctctcacacatcacacccaataatgatgaataaatactaagggaactcagaggccgggtggatcctccgtatgctgagcgctggtcccctggtcacccgatttctttctctatactttgtctgtgtctctttcttttccaagtctctcattccacctaacgaggaacacccacaggtgtggaggggcaacccaccccttcagcctgggcgacgcagggagactccatctcaaaacaaaaacaaaaacaaaaacaaaacaggccaggcacggtgggtcacgcctgtaatcctagcactttgggaggccgagtcgggtggatcacaaggtcagttcaagaccagcctggccaagatggtgaaaccccgcctctactgaaaatacaaaaattagctgggtgtagtggtgggcacttgtaaccccagctacttgagaggctgaggcagagaatcgcttgaacccgggaggtggagattgcagtgagccgagatcacaccactgcactccagcctgggtgacagagtgagactccgtctcaaaaaaaaaaaaaaaaaaaaaattgacccagcatggtggcactaatctgtaacaccaattactggggaggccaaggaaggaggggaggatcacttcagcctaggcgttcaaggctgcagtgagtgatgattgcgccattgcacttcatcctgggcaacagagcaagactctgtctctaaaaacgagtaaatgagctctcggacaaaaagctcccagcagcacagttcctgcgcaactgatgcttactaagtaggatcttgacaagcaccctttccacaagttgggagacagagtgggttgcaggagggggcatgggggctgtggtgagcagcgctggagatcctcacctctctgctggcttgcctgacaccagcgccttctgcgacgacatgatgatggaagggggcacagattcccggcggccatcgcgagtgcaatagtaattgttggagagcttgtggctaggacccacagggagcttgggaggaggctgagttctgaggggaaaaaagatgagcactgaagcaaagagacagtcactgtcatggccccgctgtgggcccctgtcacctcagtcacaaaatgtgggatctacagccagccactgggataagccacaggctgggggtgtcccttggtacactggcagggacatatgcctggggaggggtcctggggccagaagcagatggtggaccctgctctggatgtgaagatgccacccccagggaccccacctgtcccaaatgtggagggtacagaggaccctttctgaggctcccaaggcccgggacatgtccccatgccccccaccccacggctgagcttggcagccagcctcacttgactttgtccactctgagtggctttttcccctaaagccaggctctggacgccctgcgtttcctgttatctcaggaagtctctggagaaccctgctaggatcaaggcccattattcaagaacaccttagccttggagcctgtcaagatctctgcatttcctgccaccatgtggccaggcaactcctctctggagcccagagaggggtgaacagagctcggtcttggcttgaactaaaccctgggctggatttacctggaagcctgaggccttaaaagaaatgctcaaaacaaggatgggcagggtggctcatgcctgtaatcccagcactttgggaggccgaggtgggtggatcacttgaggtcaggtgttcgaaaccagcctggccaacactgcaaaccccatctctactaaaatacaaaaattagccaagcatggtggtgggaggcagaggttgcagtgagctgagatcacgccactacactccagcctgggcgacagagcgagactccatctcaaaaaacaaaaaaagctcaaaacaaaagacgggctttccagagagagggaggagagaagacagcaaaaaccgtaaattgatctgtttccacttagccatgtttctaagtcacttttttgtctgggaactgtttcccggaatttaatttttttctgaggcagtgatcatatgcactgcagcctggatgatatatgcaatcatatgatcgcttgaggtgtgatcatagctcactgcagcctcaacctcctgggctcaagcaatgctcccgcctcagcctctcaagtagctggaactacaggcgcacactaccacatctggctaaaaacaatttttctattgtttttgtggagtcgggggtcttgctatgttgcccaggttgatgtcgaattcctggccttaagttatcctctcaccttggcctcccaaagtgctgggattacaggcgtgagccaccactcctggcctttttcttaaaacaagtgttagtcactgtattttttaaaaataagaaacataaagtaaaaaatgtttaatattaaaagcaatatattatgtgaaagactttgcttaaggaggctggatgtggtggctcataccttgggaggccaaggtggaaggattgcttgaggccaggagtgttttttttgtttgtttttttttgagatggagtctcgctctgtcgcccaggctagagtgctgtggtgcgatctcggctcactgcaacctccgcctcccaggttcaagcgattttcctgcatcagcctcccaggtagctgggaatacaggcgtgtgccaccatgctggctaatttttgtatttttagtagagatgggttttcactatgttggccaggctggtctcaaacttctgaccttgtgatccgcctgcctcggcctcccaaagtgctgggattacaggcatgagccaccatgcccagtcagaggccaggagtttaagaccagcttgggcaacatggtaagaccttgtctctatacaaaaatttaaaaattagccaggcacggtaacatgtgcctgtaatcccagctacttggtacgctggaccaggaggatcacttaggcctggaagttcgaggctgcagtgagctatgattgtgccactgcactccagcctgggtcacagaaacccagtcttacaaaaaaaaaaaaaaaaaaaaaaaaaaaaggccaggcgcggtggctcacacctgtaatcccagcactttgggaggccgaggcgggcagatcacgaggtcaagagatcagaccatcctggcaaacatggtgaaaccccgtcactactaaaaatacaaaaattagctgggtgtggtggtgcacgcctgtagccccagctactcgggaggctgaggcaggagaatcacttgaacccgggaggcggagattgcagtgatctcagatccgccactgcactccagcttggcgacagagtgagactctgtctcaaaaaagaaaaaaaaaaaaagaccaataaaacatccagatgaatcactagagggtgccgtcatcctaaaaaagtcaaaactttcacaaagccatttcctcaactggcccacaactaccctgatagaaagccaactaggggggtcgggggttgggggggagagagcatcaggaagaatagctaatggatgctgggcttaatacctaagtgataggttgatctttgatctttgcagcaaactaccatggcacgtttacctttgtaacaaaactgcaaatgtaccccagaacttaacgttaaagttgaaaacaagccgggcgcagtggctcacacctgtaatcccagcactttgggaggccgaggcaggcggattatgaagtcaggagttcgagaccagactggccaacatggtgaaaccccgtttctactaaaaatacaaaaaattagtcaggcgtggtggcacatgcctgtaatcccagctacttgggaggctgaggcaggagaatcgcttgaacccgggagatggagattgcagtgagctgagattgtgccattgcactccagcctgggcaataagagcaaaactccgtctcaaaaaaaaaaaaaaaaaaaagttgaaaacaaagtttgatacttctaatatttggaattagtcacaacatataggcatttacataaatttcattattttaatgctatttttcttcctttcattataatcctcaatgactgccttacctctgcctaccctttgacttcatagattataccattatccctttccctcaatgggttccatccatactggcctccttccactcaggctctgtccagcctgacactcttagcccttcctgttccctctgctcagaatgttttttcttttttatttttttgagacagagtgttgttctgtcacccaggctggagtgcagtggtgcgatctcagctcactgcaatatccacctcctgtgttcaagcgattctcctgcctcaacctcccgagtagctgggactacccgcgcgcgccaccacgcccggctaatttttgtatttctagtagagagggggttttactgtgtttcactgtgttggccaggctggtctcaaactcctgacctcgtgatccgcctgcctcagcctccccaagtgctgggatcacaagcgtgagccaccgcgcccggtcagaatgttttttcaataattattctttgaatgggtccttcccatcattcaggggactcaactgtcaatttccaaagaaagatctttcccaatcatctgactttacgtagccaccctccagcttccacttattttgttttgtcttcaaagcattccagaacaatactacctgctgtgtttgtttccctactatgcttctccctagaatgtggcgtccatgaaagaatgtggataagaactttcctggttcacaaagttaaacccaaggctgaggtcatacatgacgggggcttgtaaatatcaactaatattttaatataaatgagtctgaaatcaggacacttctgggttcaagtccccgctgccactttttagcttctgagtgacttgaggcaaatgatttcgcctctctggacctcttttttcatctgtagcttggggataacactgactaacatggccacgctgagcactgcaaatctagcctgattgccagtcagaatgcacgcccggcctcgctgtttcaggagggctgtcctccggagttcagcaaggttaaaggcaaacctctgcctccacagcctggcaggggactggtggcaggatgtcagccctccgtttcaggggtctaaaggaacacagatttcgtttttggtggagaaaggacagagccagaggctgggcagcgagcggggcctgctcaccgcttggagatctcctggtagcgtagctgcagcttcccctgcaggtcatgctgtgggaagaggagaggagaggtcggcctgcaaggcaccccaggagagaggaaaggagagggcaagggaccagggatggtccggggatgcgcattttaagggaaggcaggggatgaacactcggggaaacggatgtgggtcctgcaggtgaagagcaaagccagagtccgggcccacagatccaaggctaagaaggtcggggactggggaaatcccaggcctgagtggttcccaggccaggagagggtcccgggctgaaggggtgactagctgggggttcccagggagattcggggagagcgaagggtcccggcttaggagggaggtgaggagcaggagcgggtcccggacacacggagcccgaagccccccatggtgcagccctgtccgccccgcgcaccccggacgcccagttccgcagccgctggatgagacgggtggcggacgccatcttccgtccgcgatactgaagggcgcagccggtgacgtctccaccgctggggctgctgggaaagacgcggcgtggtatcgcgagacgggagtgggcggtgctagaacgtcctataaaggctctccccgaagcacgtgactcctctccgccagaccgccgccgcgccgccatcatggacaccagccgtgtgcagcctatcaagctggccagggtgaggtgggggcccgaatttgggggcagggggagggattagaggagccaaacgggccgggtctgaacccagcttctttcctccaggtcaccaaggtcctgggcaggaccggttctcagggacagtgcacgcaggtaatcgggtgggggcatttggccgactgccggcgacctaaaccctgatgtgacctctaccctgccctaacccctgccagccggaatccgggagccgattctcatttcatcacggggttctgatggttccctttaacgatctgtattctggccccgacacgttctctgaattcatatctgcttcccactccgcggtgcctttccgcggcccgcccttacttcttcctccactccggtggggacccgtaggtgcgcgtggaattcatggacgacacgagccgatccatcatccgcaatgtaaaaggccccgtgcgcgagggcgacgtgctcacccttttggagtcagagcgagaagcccggaggttgcgctgagcttggctgctcgctggtgggtgcaaagaggacacccctttgatagacctttggttggtggtagggaggcttcgttaagcccagggtgagagggtttgggaggcagagtctacatacagagactgacaagagggaggcgggagtttgccaattgctgcggggcctgtcaacatctcatgtttgggtctgtttacagggtcttggatgtcgggttcgaccacttggccgatgggaatggtctgtcacagtctgctccttttttttgtccgccacacgtaactgagatgctcctttaaataaagcgtttgtgtttcaagttaactcaggttcttgtctgggttatacgactagggtttctccaggtttcttgagtggctcccaggcggtcaccgatcctccgcactctggaaatcctggccgtgcggtcttgccaaacgaagcttttcctttttgaggcggggggtcgtgtttgtcgattgcaccctctaccccaaacaaaacacaagcgtagtaggaatgttttattagcaaagaagtttcagagagtgggtggatcagggctctatcacttggtccccacctcaccttggtggggccagagtgagccccttcctgccacagtcaccccaactgaaattgcctttctcttcggccagtgttagcctctgagcaggggaccctggacccttctgtgcgccaaaggctgaggtgactgacgaggagatctccccacagctaggtgtagtgagccagacgaggcagcttactgaacctgggggttctctccattgtcaccgcattctccttcaccaggtgtggctgtctgggagccagggggtgactcgctctggagagaggggaaaagaggggggcctgctgcaatctccttgaggcaggaaacgtgggattcagccccagcctcacttagtggaggttcttttaccatggacccaggctgcctggtttgtatccaacctctgccccttctgacctggaagaggcgcttgaccttcctcccacatcccttccagtggggtgagtacaggtgttcctcagtttacaatgggttacattccggtgagtacatcataggttgaaagtattgcaagttgaaatgtgtttaatacacctaatctcccaaacatcacagcttagcatggtccatcttaagcttgttcagaacgccttagcctgtagttggggaaactcgtctaacacgaagcctgttttaataaagtattgaatgtcttatgtaatttattgaatactctgctgaagtgtggtttttactaagcacacattgcttttatgctatcatgaagtcaaaaaattgtaagttgtgccaggcgcgatggctcacagctgttgtaatcccagctacttgggaggctgaggcaggagaatttcttgaacctgggaggtggaggttgcagtgaactgagattgtgccgctgcactccagcctgggtgacagaacgagactcttgtcttcaaatgaaaaaaaaaaattagctgggcatggtagcacgtgcctgtagtcccaactacttgagaggctgaggcagaagaatcgcttgaaccccagaggtggaggttgcagtgagctgcagtcgccccactgcactctagcctcggtgacagaggaagactccatctcaaaaataaataaaaaatggtaagtggagccatggtaaattggggtcaacctgtacaggatgagtgggctgattagataacttggattatgaaagtgctaaaacatcctggcacttggccatcagagtatagtggtgttgggggttaatgtgttctgcaaactcacccagtctccagttctgaagctctggacccccttccccaccctgcctgatgccaaagggctcctttttcctttgataagagcctccctggcagtaggtaacaggagcccaggggcatgcatgaaaggtcttagctaggtctctgtgaccttaggttacttccccccttgaggactcagtctcatgacctggggtagtgtcaacctcactggggttttgctgctttcacatcaaatcccagcccctgccaggcgctctggtttcacacctgtaatcccagcacttgaggatgctgaggcagaaggatcccttgagctcaggagtttgtggctgcagtgagctctgatcacaccactacaccccaacccgggttacagagtgagaccctgtctcccaaaaaagaaaagcagccacataggagaatccagacactggttctgcacccctggtgccacctttggggagcagaaagggaggctcagggcatatttactatcctctgcaaactgaatttgcagctgggaaagtttgtttcttccagagctgtgctcacctgggtgtcgggctggcccgagctcaggtgggcatgtagcagagcggccacctcatcctgctcagcctccagggcgatggccagggcactggtgccctcctgtggaacgttagggacagtcagatccctgagccaagccatgggcaccccccaagatgccagccccattgtggggtcttacattgtccaggatggcagggtcacagcctggctgggtgagcagcagccgcacggtgtccaggcgcccatactcactggcacacatcagcgctgtggccccatccgcatcctgcgcattcacatcagccccacacgccagtagggttgccaccatgtcctgtcggccatggctgatggccagcatgagggctgtctgccccgtctggggagtggggaggaagagggaacaggctggggtaggctcagggaagggaggtcacaggttgactcccaaagtggaagtgactcctggctgagagccacagtgggggcgcccacgcacctgactggccttggcattgacatcacccatgcagaagagtctctggaccacagccatgtcctcctcttcctgcctcacagaggtgagtgcagccagcatgagggccgagtagccggctcggttctggcggttgacctcgcaggcccctgggagagaaaagggggccgtccacggagatgccaacaccgcggcccgacttgatccactcacctccctgcaagcctcgggcacagcacctgcatatggggtggtctcaacgttctccccacaatagctacctggttcctccctcactaaggtgttgctcaaataccatctgctcagtgaaggaccttcctgtttcatcttttttttttttttttttttttttttgagacatagtctcgctctgtcacccaggctggagtgcagtggtgcgatctcagctcactgcaatctccacctccggagtagctggaactacagcatgtgccatcacacccagctaatttttgtattatttagtagagacagggtttcaccatgttggccaggctagtctcgaactcctgacctcaagtgatccacccaccgtagcctcccaaagtgctggaattagaggcatgagccactggcccagtggctatttcaaatcaagtccctgtttcaaatcaggcagggacttggttttgtttgcttctgtatccctcagtacttagaacaatacttggcacatagtagatgctcagttaaacatttgttgactgaataataaaaggatatgtttattttcatggccaccacccgccaagccaccatcattgctcccctaaagaacagtgccagcctccacccttctctctgaatccactccaggttccacacagcagccaggagcaactatttatttatttagagatggagtctcattctgtcgcccaggctggagtgcagtggcacgatctcagctcactgcaacctctgcctcccaggtttaagcgattcttctgccttggccacttgagtagctgggattacaggcatgcaccaccacgcccagctaatttttgtatttttagtagagacggtttcaccatgttggtcaggctggtctcgaactccgacctcatgattcgcttgcctcagcttcccaaagtgctgggattacaggtgtgagccaccgcgcctggccaagagcaacaattcaaaatgaatttggttgccaggacactggctcacgtctgtaatcccagcactttgagaggccgaggtggttgatcacttgaggtcaggagttcgagaccagcctggccaatgtggtgaaccccatctctactaaaaacacaaaaaatagccaggcgtggtggcaggcacctgtaatctcagctactcaggaggctgaggcaggataatcacttgaacctgggagctgcagtgagccaagatcacgccactgcactccagcctgggtaacacagtgagaccctgtctcaaacaaacaaacaaaaacacctgccaacaccttgatttcagacttctggccacctgttgtaaaaaaaaaaaaaaaaaaaaaaaaagccaggtgcagtggctcacgcctttaatcccagcactttgggaggctgaggcgggcggatcatgaggtcaggagattgagatcatcctggctaactcagtgaaaccccgtctctactaaaaatacaaaaaaaaaaaaaaaattagtcgggtgtggtggtgggtgcctgtagtcccagctactcaggaggctgaggcagaagaatggcatgaacccgggggacggagcttgcagtgagccgagattgcgccactgcactccagcctgggtgacacagctagactccatctctcagaaaaaaaaaaaaaaacctgccaacaccttgatttcagaagtctggccacctgttgtttgaagcagctcacagtgatactttgatggcagccctaggaagcaaaacagcctggtcaacactgcctatcctgaatgaaacacaaacgtgagctcagtttcctctgggatcagttctgttaccatcctggtccctgttcctcacagtgcctgtttggatgatatttcctggagtggctgttttaatccctgtctcctgccattctgaaggctctgaggattgaggtagtttaaggaaatgaatgagaagcttggggaaaggagcggggtcggggtcatgagatggataacctagtgaggaaggagagctgagatgagggactgaggagtaaagggttaagtcaaatgacagcaaaaatggaggccaggcatggtgactaacgcctgtacacccaaatgcttagggaggccaaggcaggaggatcacttgaggccaggagtctgaggccagcctgagcaacataggaagacccccccatctcttaaaaaatttggccggacacggtggctcacgtctgtaatcccagcactttgggaggccaaggcaggcagatcacaaggtcaagagatcaagaccatcctggccaacatggtgaaacaccgtctctaccaaaaatacaaaaaattagccaggcgtggtggtgtgcgcctgtagtcccagctacttgagaggctgaggcaggagaatcacttgaacatgggagacagaggttgcagtgagccaatatcacaccactgcactccagcctggtgacagagcgacactctgctccccgccaaaaaaaaaattagctgagtgtggtggttcatgcctgtggtcccaaatactcaggaggctgaggtggaaggatcgcttgagcctgggaggttgaggctgcatcacgccactacaccccagcctggaacaaagctgtctgtaaaaaggggttggggggacgttccctgtttgggtggcatgctgtgtgggtgtccatgccttccactaagacaccgtgtaaggcgtcaggtggtcagggaggagcacccagaaataaccagagtggggtccttgcaggctagccaaggacccacctatcttcctgctccctctcccttttctcttgcagctaccttgaccttgcttaactaaagaatcaccctggctaggcacagtggcttacgcctataattccagaacactggaggccaaggcaggaggatcacttgagctctggagttcgagaacagcctggacaacagagcgagacctcatctctactaaaaatacaaaaattagccgggtgtggtggagaacgcctgtaatccccgctacttgggagactgaggagggaggatcaattaggcccaggagttggagatcagcctgagcaacatggtgaaaccccatgcctacaaaaaaatttaaaaagaatcaccctttgttgacttcatcccctggttgtcttctgctacggcccttactagcatttgaaattatttcacgtttttacttgataatcgtctctctccactcttcactcaccacccccaccacacacacacacacacacacacacacacacacacacacacacacactcaaaactacacattcctgaaagttctgtgggagcaggcatttattcaacacttgacggtttgctgtgggtttgtcaggcaggcaggtagggtcgggtgagagaggggtatggagaagaatccacaacaggctgaaggaggatgacagaggcaaagagacaaggggtgggggcagtgaaacggagagggagcagtgggtaattgtccccgcaaggtccaaggattactggagttggggaatgggagcctgtgagccgagaagctgggaggtgagggtcgggaagtggggagctgagaagtgagattctgtaacgggcacaactattagggacatcaaggtctggggctgatgttatacctgtaaagctgatgtggggcagagtcaaggtcaaggaaggagagcagccaggaggttgcagggatcatgggggaggatgttgaaattgacaagtgggccgagcgcggtggctcacgcctgtagtcccagcactttgggaggctgaggtgggcggatcacgaggtcaggagatcgagaccatcctggctaacacggtgaaaccccatctctactaaaaatacaaaaaaaattagccgggcgtggtggcggacacctgtagtcccagctgctggggaggctgaggaaggagaatggcatgaacccgggaggcagaccttgcagtgagccgagatggcgccactgcactccagcctgggtgacagagcgagactccatctcaaaaaaaaaaaaaaaaaggaaattgacaagtgccggctgggtgcggttgctcactcctataatcccaatactttgggaggctgaggcgggcagatcacctgaggtcaggagttaaagaccagcctggccaacatggtgaaaccccgtctctactgaaaatacaaaaattagccgggcatgatggcgcttgccagtaatcccagctactcgggaggctgaggcaggagaatcactcgaacccgggaggcagaggttgcagtgagctgagatctgagatcacaccactgcactccagccaggcaacagagcaagactcggcctcaaaaaaaaaaaaaaaaaaaaaaaaaagactaactatagaatgctctggaaatgcaatcttgagataaggaggaactgactggaacagcctaggctctgttcctgtccccatctagaaacaggttgtcctttaatgcattagcccagcaattcctgttccccagggtataaaacctagagtgggccgctttccagggtccctcacctgccgtgcaagtggggcacctgcagaccagattccatacaccttgggcagccttcctgagccttgggggattggctcactgtcaatcttaggcttctgctgtcccttgctgcctatctgtaaataaggaacctgctttgtgtaacttgttatgtgaatgagtattctaccttaccagactcaggcaggtaggaaaagcacattcctaggtgcaatgggctgaaggggtaaccagtgcacagtggacctgctttgcagcaaggattaggctggagggagagagggagaactggccaggagctaaagttcaagaaaggaggagctacttgaggtcagaggtagaagccagagaggcagagtgaggaggggcctagtcagtgacaagatgctccaaggtagggtttgagaaggaagagggtgaaaggtctggaagtggagaagaagagcaaagtgcacacccacgtacctccagactctggattccaggggatgaaagaggaaacagcccctgaatgcaggggcgttagtgtatgtgacagcaagcaagtacaggcagaggggagatgagtaagaaccaggggaaggtctggagaggtggagccaaatgggaattagaggctgggcacactggctcacgcctataataccagcactttaggaggcctaggcaggaggatcacttgaggtcaggagttcaagaccagcctggccaacatggtgaaacccatctctactaaaaatgtaaaaattgtctgggcacggtggctcacacctgtaatcccagcactttgggaggctgaggcaggcggattacctgaggtcgggagtttgagaccagcctaaccaacatggagaaaccctgtctgtactaaaaatacaaaattagctgggtgtggtggtgcatgcctataatcccagctactcgggaggctgaggcaggagaatcacttgaatctgggaggcggaggttgcagtgagccgagattgtgccattgcactgtagcctgggcaaaaagggcgaaactccatctcaaaaaaaaaaatacaaaaatacaaaaattagctgggtgtggtacacgcgcctgtaatcccagctactcaggaggctgagacataagaatcacttgaacccgggaggtggaggttgcagtgagctgatattgcaccactgcagtccagcctgggcaacagagcaagatctgttcgaaaaaacaaacaaggccgggcaaagcggctaatgcttgtaatcccagcactttgggaggccgaggcaggcagatgagttgaggtaagcagtttgagcctggccaacatgttgaaaccccgtctttactaaaagtacaaaaattagccgggcgtggtggcgggcgcctgtagtcccagctactcgggaggctgaggcaggagaatggcgtgaacccgggaggcgtaggttgcagtgagcagagagatcatgccactgcactccagcctgggcgacagagcaagactccatatcaaaacaacaacaacaaaaaaggggtgggggggggattcaaatgtaggagataaaggggccaaggagcctggggcctcttgcagtgaccaacgacgcctacttccttgccgcagccccagccccctttaaggcatgagatgcccaaaaaattcacttagattcattcactgtcccctgtctcctacaatgccccagcttccagagcagctatatcctttcctaggtcataaagacctgcagggatgggagggatctgcgtgtttagggggttgggggcaggcagtgggacccgcctcaacctgcagttagtaccagaggtgcccaaaggctgactcagaggtttctgaacctgcaggagggtacctggagggagggggctcctggtggacagcgatttgtttaccacccaccagaccctttgtgcccagtttatcagggcaagcagctggaggtgggtggggcacagtgccccatcccaggaggagtcagagccctgcctggtgagtacctcccctccaggctggacactggggctcaggaactcggtgagtgctccagctggagattcagggacagagcacatgctggccatttactgatctcgtactacctgtattatcataggtacccagggagggaggccttgccaaccccatttcacaagcaagattaaataatgcccctaaactgaggtttacctaagtccagaactgtgtattccctccagctgcaaagtaggaggagcctcagggcagaactaggggtatggtggggccaaaaggcctctttttttttttttttttttttttttttttgagatggagtcttgcattgtggcccaggctggagtgcagtggtgctcactcttggcttactgcaacctctgcctcctgggttcaagtaatcctcgcacctcagcctcccgaatagctgggattacaggttcccaccaccacgcccagctagtttctgcttttttgttttgttttgtttttgtttctgagactgagcctcactctgtcgcccaggctggagtgcagtagcacgatctcagctcactgcaacctctgcctcccaggttcaagcaattctcgtgcctcagcctcctgagtagctggaattacaggcatgtaccaccacacccagctaatttttgtatttttagtagagatggggttttgccatgttggccaggccggtctcgaactcctgacctcaagtgatctgcccacctcggcctcccaaagtgctggggttaaaggcatgagccaccatgcctggctcagagggcagaaggcctttgggaacccagacaggaagaggtttaaaacccaaggaggttggctgggcgcagtggctcaggcctgtaatcccagcactttgggaggccggggcaggcagatcacgaggtcaggagatcaagaccatcctggccaacatggtgaaaccccgtctccactaaaaatacaaaaattagctgggcatggtggcgcacatctgtagtcccagctactcgggaggctgaggcaggagaatcgcttgaacctgggaggcggaggttgcagtgagccgagatcgcgccactgcactcctgcctggtgacagtgtgaaactccgtctcaaaaataaaataaaataaaataaaataaaataaaataataaaattaaaataaaataaaataaactcaaggaggagtggtgccctgtgctggacagccattctctgctttcctctccagagtctttgagcctaggtcagcccctgccctctccccccacccatttcctggtgtcccacccaccctcccttggctctgacccgtatccaggagcaggcttgcgatggccaggttcccgtgggacacactgtagtgcagggccgtgttcccgttgccatccgccaggttcaccacgtgcgccagcagttcgggtcccaggcgcctcaccccttccagcatcctggccacgggctccgcctgagagcgccgctggctggacactcgaaaccactcctgggccacgaggcgcactgcgccctgcaagggacaggggccaagataacatcggcgatggtccacggcggcgccgtggtgggggagctggggaggggcgggactgggaagagacccatttggcgtttccaggcaagtaaggaaggtcactcctcgtccaggtggggagccatgcgaacccagatggagggctggggccacacccctatcggagggcaaacacgggggaagggggtcctttccttccagggaagaatttgcgggagaacatggaacggggaaaggcaatgaacgcttgcccttggggagtccgggagtggggctggggccgggcctttttggggaaaccaaggaaagatcggcgctgtcctgggaaggagatcccttcggagagcctggggtcaggcgaggtgcctggcgggaagggatggaacccggtgtgctcccctaagtgggcgtcagaggtccttggaggctcccacgccactccctggtgctgcgctcccggggcactcacgccgtcgctggctactccgcggggccggctcagctgccgctgcagcgctacgcacgcctccctcagacgcgggctcagctcgcacctgcagaggaggccaggagagactcaggatggatcggggacagcgccgaccaggaggagggcagccgcctcctctccaaacaactagcgagcgccgctcacctcccctgtgccacctgctgaggctctgcctccgcctcgggctcagggtcccggatgtccccgccgctgggagggccaggggtgcccgagtcggatcccccgccgctgtcatccccggagcccgaggagctacccgggggctcggcgccaccgttctcgctgtcgccatcgctgtcgctggcgtcctcgctggaggagctctcgtacctgggggcagggtgggaggtgtctgctaaacctcccctgtgggctcgttctggagtcctgcgatgtgggtgtggccgttcccatttaacgatgaggaaactgaggattgcccagaccacgctgccagtagaggggcagagctggggttccaaccccagtctatgtcccggcagaagctgccacaggaggggaaaggcgctcactctccgttgaggaccccaacaaactgcaggctcttgggtccggagctgggttgggcaccaggtgtgccgtctctcttcttcatgatggatttgaggatgcctggcggggatgagatgagggcactgagttcgagtccggcgccgagtaagccagggcccagcgacggggtcgggactcacccgcgggcgccacggccctgtctccgtccatggatccgggcgagctctcctgagtcaaggagggcgcctctgccggggactcggtctgcgcggccttttcggcacagctccacggggtctgggtggtggcctcgcgtagctgggcccgggcccccgccgctgcctcctccgcagcctcgcgggcttcctccagctcccgcaaccggccccgcagaagctcactcaccccgcgctggtgctccagactggcgcgcagcagctctagctcgcgctcggcggccgcaggcagccccagcagcgcctcggtcacccacgcgtccgcctccacggtctcgggggcagcctccacgccggcctcccgggtctccggcacggcctgggcacccgcttctcgggtctcgggcacggcctcggcggccacctcccgggtctggggcgtcccatcgagactcccgacctccccgtcgaggacctggagcgcgccctcgctgcgccctgcagccaggccgtctgggctgtcagcccgggggctggccctggcacggccgccgcgctcggaggtggccaggcgctcggtgagccgccgcagctgggcgagcttgtccgggcgcgtctcagcctccccgtccggctcgggctgcgcgcgcccggccagcagccgcgccttctcggcgcgcagcgcgcgcacctgctcctgcagctcgggcagcgttcgcgcctggtcctcgagctcgcgcaggcgccgcagcgccgcggccatctgctcgcgcaccagctgcagttgggcagggccgggcgaagcaggggcaaggttaggggcggggctgctgcggccggacccgcgtgggctgcgcgggaccccgcggccggggctgggcgcgcgctcgtgtgtctgcgccagctccagccgccggctggtctcccggagcgtgtgctcgacgcgcgggttgcgcacgggcgcgcgcggcgacagcggctgcatcaggagccccgagggcgcgccctgggagagtatgcccggtgctccaccgtcgtcactggccagggactcgctggatgtccaggcgcctgggctacgtgcgcccgcgaggccgggccggggcgcgcggggacggcgcgaggtcgggggtcccggggcgcggcgggcagcggggccacgctccagctcctctatgtacttgaggaagtccaggtccaggtggaagccgtagggcgtctccaccgagtagggcgagctcgggctgcgtgcgcccccggcggcggggaccgggcacaggcgggggccgcccaggtctggaggcacgacgggggcacggggagggcgcatcagaacggggaaacccgggagatactaaacaaaccgagcgtgtcccccacccatgcccacgcttcacacctatctgtacccaagtattaactcaatcgcttgtttaatgagcacctactctgtgctaagcaagtttctaggcccgggggacacagcagtgagcaagacaaacatccctgtcctcctgtagaaagcagataagcatccttccaaacgatgcctacggcaatggtaataataacagggaataaacggaggaggcccgatttagcgtttggttgccagggaagctttcctgtgaggggactttcctgtggagtggagccctggcccggcgtgtggttcgcgcctgtagtcgcagcattttgggaggccggcacaggcggatcacctgaggtcaggagttccagaccagcctggccaacatggtgaaacccagtatctgctaaaaatacgaaaattagctgggcggtagtggcgcgcgcctgtaatcccagctactccggaagctgaggcaggagaatcacttgatcctggtaggcggagtttgaggtgagccgagatcgcaccaatgcactccagcctgggcgacagaagagaacctctcaaaaaaaaaaaaaagtagccctggccgggcgcagtggctcacgcctctatctcaacactttgggaggccgaggcgggtggatcgctagagcttaggagttcgagacaaacctgggcaacaaagtgagaccccatctccaaaaatatatatatacacatatacatatatatacatagctgtgcataatggtgagctactcaggaggctgaggtgggaggatcacttgagcctgggaggcagaggttgcagtgagccgagattgcaccactgcactccagactgggtgacagagtgagaccctgtctcaaaaaaaaaaaaaaaaaggttggcgaggggaagccctgcacgatgaggaggaagcagctgggaaaaggtttctagaagaaaacagcccatggaaataccctggggtaggagggaggagggtcagctggagtcacagcgagatggagaccagggtgtcccgagcagagtaaagaaggcagggggaagaggaatggacgcacaagggccacacttccctggtttgagggctacctggggtggcagggggtatagtccacttgcgattagtgccataggtggggtgttttttgttttgtttttttcttttttttgagacggagtcttgctctgttgcccagactggagtgctgtagtgcgatcttggctcattgcagcctctgcctcccaggttccagcaattctcctgcctcagcctcctgagtagctgggactacaggcacgcgccaccatgcctggctaattttttttttttttttttttttgagacgcagtctcgctctgtcgcccaggctggagtgcagtggcacaatctctgctcactgcaagctccgcctcccgggttcaagccattctcctgcctcagcctcccgagtagctgggactacaggggcaccaccatgcccggctaattttttgtatttttagtagagatgggatttcaccgtgttagccaggatggtcttgacctcctgaccttgtgatctgcccgcctcggcctcccaaagtgctgggattacaggcatgagtcaccacaccgagccgtgcctggctaatttttgtatttttagtagagacagggtttcaccatgttgcccaggctggtctcaaactcctgatctcaagtgatccgcccaccgtggcctcccaaagtgctgggattacaggcatgagccaccgcacccggccatgattgatgccataggtggtttaaagcaggctcatgacattggagaggactgcactctagggctgtaggctgcgtccacacacaagggcatcaagcgtttctctgtgcatgcgcacacacacacacatctctctttttgcacactcaccgggcaggttctgattcagggcaaacttggccatgtttcctgcagcagctgtcagaggcaccctgcaaaaggggtgaaggtggggctgggcgctgtccctctggctggagcctctggggcctgcctttgagtctaagcaaacaggacccaagagctctcctccacccagccacctccctccacacatggcctctccttcctcttccctaaagaaaccttgaaactttttttttttttttttttttgggacagagtctcgctctgtcacccaggctggagtgcaatgccacaatctcggctcattgcagcctccccctcccgggttcaagtgaatctcctgcctcagcctcccaagtggctgggattacaggtgcccaccaccacgcctggctaatttttgtatttttggtagagatgaggtttcaccatgttggccaggctggtctcgaactcctgacctcaagttatccgcctgcctcgacctcccaaagtactgggattataggcatgagccaccgtgcctagccgaccttgaaactttggatggaatgaatgatccccaggtgtcagatgtcagcctgctgggcaggaggaagcaggaaagacatcaagcaaaaagaagaaggtgaccaagaaaacaagggtagctgggagttggggaggcattccagacctgctgggttttctgataatctctggggaaaatcagaaatggacgctctatgtagtggactatgagcctttaggaaagaaagaccagagttggaagcccttcacaggatcattaaaaactcatctaggctgggcgcggtggctcacgcctgtaatcccagcactttgggaggccgaggagggcggatcatgaggtcaggagatcgagaccatcctggttaacacggtgaaaccccatctctactaaaaatataaaaaagtagccgggcgtggtggcaggcgcctgtagtcccagctactcgggaggctgaggcaggagaatggcgtgaacccgggaggcggagcttgcagtgagctgaggtggcgccactgcacttcagcctggcaacagagcgagattccgtctcaaaaaaaaaaaaaaaaaaaaaaaaaaggatgtaattgtgcatccaaatttttaccaaggtcagttgtgaaactcttgcaggaatgatggggaattgcgggctggatgcaccaaagatccaaatcaacaaatcaacggatacttgtctccctggaatgtcgctagcggagtgtcacaggcttgatccttggcttgtaagagtttgtaatgcaaacacaaaacacctgggttgtcagagctgtgactattcatggggctgcctgggaaagtgactgtttggatgacatgatggaggctgtaagaaagtgaggaagattgggccacatataataatgtgatatttaacaaggacaaatattgaatccagaactttggttcaaaaagcacagggtgaaatctcagcactctgggaagccaaagcagaaggatcgcttgagcctaggagtcaagacccacctgcgcaacatagcgagaccctatctctttttgtttttttttttttttgagacagaatttccctcttgttgcccaggctagagtgcagtggcacaatcttggctcactgcaacctctgcctcctgggttcaagtgattctcctgcctcagcctcctgagtagctgggattacagccactgctactatacctggctaattttttgtatttttagtagagatagggtttcatcatgttggccaggctggtctcgaactcctgacctcaggtgatccacccacctcggcatcccaaagtgctgggattacaggcatgagccaaggtgcctggccactatctcttttgtttgtttgtttttaaatagtgaaaccaccaagcacagtggctcacaagccattgctctccagcctgggcaacaagagcgaagctctgtctctaaataaataaataaaatagcgaaaccccatctctacaaaaaacacaaaaattagctggatgtgttggcatgcacctgtagtcccagctactcaagaagctgaggcaggagtatctcttgagtccaggagatgcaggctgcagtgagttatgatcatgccactgcattccagcctggttgacagagcaagaccttgtctcaaaaaaaaaaaaaaaaaaaaagaaaagaaaagaaaagaaaagcacaggaacatggagtgggaaagatgggctttggaaagcccacatggaaaaccttcagggaggggaaagtgcctacggtgtgcccttcctgattaaatgtcatcgccatagctggacacaatggtgcatgcctgtagtcccagctactcaggaggctgaggcaggagaatcgcttgaacctgggaggcagaggttgcagtgagctgagatcatgccactgcactccagcctgggggacagagccagactccgtctcaaaaaaaaaaaaccatatatatatatatatacacacacacacacacacacacacacacagcccccatacaacactttgcatactgcaaagtagtattattattcatattttacagatggagaaactgaggcacagaacaattaaatcagttgcctgtgggaagcaccctcagattgggctctgcccatctgcggaacccttgtcagcaggtccctgccacagcttctgactgccctttacctgtccagtcctccactgacaggcatctgccaaacccacttcatcctctccctgggccacggcccgtctgtgctaaccacatggcaacactcccagccaccccttctggcttctcgaatccctgggaccacctgtgtgcctgatgctatgaagcactgagcacccaccagccctcctgactcattaccctactccaccgctggggaaaccgtaactccatttcccacttctgtctggccgaggtccctgacctctcccttcccactccaaggccaggcagggggcctcttccagtccccaagcagctgtttcccgtcccttcacaccagctgcaaggggtggatcaacaggccagcgggtcatcgcagaggacagccaatgccgttcatcacttgttttcaggaaattgccagggaagaactgggttgtggaaaaagtccagatcaagggttggggggtctgggtctacttctcacacagctggccgtatgacgcaatggggtcagcgtcctcctccggtgacctggtcacacccaaatcccaggccctgggatctcagaagacagctgtgggccattcctaagacctaaactagctgaagcagttggatccagaggctgggctaagaaaggaatggatccctccagaatgtcaaataataacaacgcttttgatatttactatgggccagcctctagtctaaggaatttatggatatttactttttttttttttttttttagaggcaatgtctcgctcactctgtcacccaggctggagtcagtggctcgatcatagctcactgtggccttgaacccctgagctcaagtgatccgcctcagcctcacaaatagctgagactacaggaatggacctctacacctggctaattcaggctaatattttaaattttttggttttttgttttagatggagtcatgctctgtcgcccaggctggagtgcagtggcacaatctcagctcactgcaatctccgcctcccgggttcaagtgattctcctgcctcagcctcccaagcagctgggattacaggtgtgcaccaccatgcctggctaatttttgtatttttagtagagacggagtttcaccatgttggccaggctggtctcaaaccaggcgtgagccgtgcccggcctaattttattttttgtagatacaggtgtcttgctatattgcccaggctggcctccaactcctgggctcaagcaatcttcccagttcagcctcccagagtgctgggattacaagcatgagctactgcacctgaccttgacttattttttaaaatcctagctaaatccactgaggttggatttcctatgatcattgtcccttcccctattgtacagatggagaaactgagacacagaacagtttagtgtcctgcctgggtcctgtcataaacaggcagaggcaggttttaaacccaggcaggtcttccagagtccttgctttggccactacacttgaatgctttcttttatttttatttttgagacggagtctctgtcacccaggctggagtgcagtggcaggatctcggctcactgcaacctctgagcccagggttcaagcgactctcctgcctcagcatcctgagtagctgggattacaggcacttgccaccacagctggctaatttttgaatttttagtagagacgggtttcatcatgttggtcagtctggtctcaaactcctgacctcaagagatcagccctacttgacctcccaaagtgctgggataacaggcatgaaccaccaaggagcctcagggggcttgtccctcccagcctacacctgtgtcagactctgattgggggcggaggtgcccaccacctctgcggcttcaggggctggggcctcactaagtggggcgtttagctgccttccctctcctccgctccctgccctgactgtcacagctagatccggattctgtgcctgagaccccctcattaggccgtcagagccgacgccacacgccccctctcccgccccagggactattttgggacgcagagctgtgatcaccaaaccggagtggtgggggccacggcaggccagtgaggatcccagtcctggggagagggcgccttccaggaggccctgagtactggcagcccctgatgtctgctgggactctcagactcttgaggtgggtgggtgggggaccggtggcggcaggaaggtgggtgttaaagtcatcatcacccgtccacccccaggtcgtcctagccgcacagagacagagcagtttcctacaggaagcgccgccgggcggttccatccgctacccattgtctgcgggtccgggggccgtgcgtccctccccaaaacaccatttccgtgacacgctcccacacccagcccagcgcgaggggctggctggggtccccaggccgtcccgggaaagggtcccagggccggttgtggcattagggagcgaacgagccccgcagtgagctcccgaagggcgagaggggggcaagcccacgcctccagagccccccactctgctcgctacccacctgggacttccaatgtgggaggggtcccggccagaggacacgacgcccgccccgtcgcagcgggcagagccctcagtggggctggaaacgcagcgcagcgccgggtcccggtgcgtccccgaatccacccacccaggggtcccccatccgtgtccccgcaagctggcaatttacctgaagccgcagccccagccgcgcccgcacccgagcccgccccctcgaagtccggggactgattatcaaggccttcgccctaactgacggccacgccagccaaccagcacccgaggctctccaagccgcccagtgggacggtggggtgggacaggcaggcggggcctggaatgtaggggtggtgactgagggcgggccctggagtgacggtcgccgagcgctggctggcggcatttctgcaccagcagaggtcaagtctctgcccagcgccgggccaaggagcttggatttgatccacaggcacgagggagccatgggagaactatgagtagaagagtaacccggtgggatttctataactggcacttatttcgcagtgcctgggtgaagtatcaggtcccggatcttccccaccgcagggcctctgcacatgctgttccacctacctgaaatgctttcccttgcacctgtacacgtaggtactttttgaggctcccctactgttttttgttttgttttgtttttgttttttgagacggagtcccaggctggagtgcagtgacactcactgcaacctccgcctcctgggttcaagcaattctcctgcctcagcctcccgagtagctgggattacagacacacaccaccacgtccagctaatatttgtatttttagtagagatggggtttcaccatgttggccgggctggtctggaactcctgacctcaagtgatccgcccgcctcagcctcccaaagtgttgggattacaggcgtgagccaccgcgcccggccttccctactttctgaggttcagcttttgtgttgctgccccctaaattcctgacatagcccctccccagttagtatttttctcatcactctattgtattaacctaatagctacttttactatctggaaaaaaaaaaaaaagcagactctgttattggcaggcgcagtgactcacgcctgtaaatccagtatttagggaggcatagatgggaggatagcttgagccaggagttgagaccagcctgggcaacatagcaagacctagttctcaaaacaaaagaaaacaacaaaacaaaaagacaaaaacgaaacactcagttatttatttggtttattttttaatttaatttaatttttttttagacagagtctcgctctgtcccaggctggagtgcagtggtgcgatcttggctcactgcaacctctgcctcctggggttcaagcgattctcctgcctcagccttctaagtagctgggattacaggcgcacaccaccacgcccagctaatttttgtatttttagtagagacagggtttcaccatgttgcccaggctggtctcgaactcctgacctcaggtgatccgcccacctcagcctcccaaagtgctgggattacaggcgtgagccaccatgcctggctggttatttattggtttacctgcttgccatctcactaaagtgtcggcaccaaggccaggtggggtggctcatgcctgtaatcctagcacctcctgaggctgaggtgggaggatcttttgagcccagcagctcaagaccagcctgggcaacagagtgagactctgtctctaaattaagtgtcagcaccatgggaacaggaaactggttttgataactgctttatccagcgaccctagtacacagtagatgcttaataaatgtttgctgaaataatgttttctttttcttttttgagtcagggtctcattctgttgcccagggtagagtgctgtggcacaatatctcagctcactacaaactccgcctcccaggttaaagagatcctcctgcctcagcctcccaagtagctgggattacaagtgtgtgctacgcctagctaattttttttatttttagtagagacgggcttttactactttgcccaggctggtcttcaactccttggctcaagcaatccacctgccttggcctcacaaagtgctgggatcacaggcataagccacagcacctggccagaatatagtaatattttaaaatgtattttaacatctgatactttttaaaaaaaaacaaaattcctgggctattttaattggttgattctttcagttaaaactgtggaattctgtcgcgtttccccacagaaactccattggaattttcttctttgttcctttgagacaaagtttactctgttgccgatgctggagttctgtggcaagacctatggctcactgcagccttgaactcccagactcaagcaatcctcccacctcaacctcccgagtagctgggactacaggcatgtgctaccacgtccagcaggtttcttatttttgtaaggacagggtctctctatgttgcccaggctggtcgcaaattcctgggttcaagtgattctcctgcctcagcctccctaaatagtggcataacaggcatgagccgctgcacttggcctccattggaatgtttaaaatatatgtgtgtgtgtgtgtgtgtatatatatatatatatatatatatatatatatataatttttttttttttttgagacggagtcttgctctgtcacccaggctggagtacagtggtgtgatctccactcactgcaagatccgcctcccgggttcatgccattctcctgtctcagcctcccgaatagctgggactataggcacccaccaccacacctggctgtttttgtatttttagtagagacggggtttcaccgtgttagccaggatggtcttgatctcctgacctcgtgatctgcctgcctcagcctcccaaagtgctgggattacaggcgtgagccaccgcacccagccctaaaatatttttattgtggccgggtgcggtggctcacgcctgtaatcccagcactttgggaggccagggcaggcagatcacctgatatcgggagttcgagaccagcctgaccaacatggagaaactccgtctctactaaaaacacaaaattatcccagtgtagtggtgcatgcctgtaatcacagctacttgggaggctgaggcaggagaatcacttgaacctgggaggcagaggttgcagtgagccgagagtgagccattgcattccagcctgggcaacgagagtgaaactctgtctcaaaaaaaaaaaaaaaaaaaaaaaaatatatatatatatatatatatatatatatatatatatatagttgtaaaataaagcgtccatagatgcacacacacagcagattcaagaaaccacataaaacaaatgtatactctttccctaagtggcctgaggtaatctgggaaaatggttcgctatttacttgacccagagaaccccacaaaatcatgcaaatcaagaggttcaaatcttcatgttcacttggagaacactcatgaaactgcccaggccatcaagggtatgtatatatgaaaatccacgaagtatctgaaagatgtcactttacagaaactgtgtgtaccattccaacattacaatggtggagttggcaggtgtgcccaggccaagcagtggggctggacacaaagtcagtggcccagaaaaagtgctgaatttttgctgtacatgcttaaaaatgcagagagtggccgggcatggtggctcacacgtgtaatcccagcactttgggaggctgaggtgggcggatcacctgaggtcaggagttcgagaccagcctggccaacacggtgaaaccccatctctactaaaaatacaaaaattagctgggtgtggtggcacgtgcctgtagtcccagctaccagggaggctgaggcaggagaattgcttgaacccgggaggcggaggttgcaaagccgagattgtgccactgcactccatcctgggcagtagagcgagactccgtctcaaaaaaaaaaaaaatgcagagagtaatgctgaacttaagggttatatgtagattctctggtcattgagcatatccaagtgaacaaagtacctaagatgcgtcgccagacctacggaactccggtcggattaacccatgaatgagttctccctgccacactgagatgattcttactgaaaaggaacagatttttcctaagccagaggaggaggttgcccaaaagaaaaagatatcccaaggccgggcgcagtggctcacgcctgtaatcccagcattttgggaggccgaggcgggtggatcacctgaggtcgggaggtcgagaccagcctgaccaacatggagaaaccccatttctacttaaaatataaaattagccgagcgtggtggcgcatgcatgtaatcccagctactcaggaggaggctgaggcaggagaatcatttgaacccgggtggcagaggttgcggtgagccgagatcgcaccatcgcactccagcctgagcaacaagagtgaaactccatctcggaaaaaaaaaaaagaaagaaaaagatatcccagaagaaactgaagaaacaaaaacttatggcatgggagtaaattcagcattaaaataaatgcaattaaaagtaaaaaacaaaaacaaaaaacaaaacaaaaccaacaacaacaacaaaaaaccccacaaatgtatagtttaaggagttcctccagggggtagttctcaaccaggagtgattttgccccatgggagaatgtttgacaatatccaggagcacttttgggtaatgaggaggcgggtgtttttggcctctagagggcggaggccaggaatgtagctaaccaccctgcaatgcacaggccatccccaaggaccaagaattatgtggcctgaatgtcaagagtgctaagtttcagaaacccagtgctgagatgaaggtcatcgtcgcctccacccgggccaaccaactgcacttgccagctaccccagaagcgcctccgtggactatgtcctagtcacagctgcccctcactccctaagtaaccactgttttgtgacttttatttatttgtttgtttatttatttatttatttttgagacagaatctcgctctgttgcccaggctggagtgcagtggcatgatctcagctcactgcagtctcctgggttcaaatgattctcctgcctcagcctcctgagtagttgagattacaggtgcccgctaccatgaccagattttttgtatttttagtagagatggggtttcaccatgttgaccatgctggtcttgagctcctggcttcaggtgatccacctgcctcggcctcccaaagtgctgggattacaggcatgagccaacacgcccggccctgtgtaggtttctgtttgtttgcttatttatttatttcgagacagagtctcactgtattgttcaggctggagtgcagtggtgcaatcaatgctcactgcagcctggaactcctgggctcaaatgatccttagcctcctgagtagctgggagacaggtgagcgccactgcacatgtatagttttattatccaaatgtgaatctgtagacactggagtttagtcttgcccattcaaaaagaaaatgatatgtcttttaagctccccctgcccgtttttttttttttttttttgagacggagtcttgctctgttaccaggttagagtgcagtggcgtgatcttggctcactgcaacctccatctcccaggttcaaccgattcccctgcctcagcctccagagcagctgggactacaggcacaagccaccatgcccagctaattttttgtattttagtagagatggggtttcaccatgttggtcaggatggtctcgatctcctgaccttgtgatcgaccagcctcagcctcccatagtgttgggattactggcacgagccaccgcgcccggcctaagcctgtttatttatttatttatttatttttaattttatttttttgagatgcagtttcactcttgttgcccaggctggagtccagtggtgcaatcttggctcactgcaacctctgcctcttagattcaagcgattctcctgcctcagcctcctgagtagctgggattacaggcatgcgccaccacgtccggctaatttttgtatttttagtagagatggagtttctccatgttggccaggctggtctggaactcccgatctcaggtgatctgcccacctgggactcccaaagtgctgggattacaggtgtgagccaccgcgcccggcctaagcctcttttaattcacaggttcctctccatccctccctttcccttacaatagaagcattgcatgcctgggcatggtgcctcacacctgtaatcccagcactttgggaggccgaggcagcaggaacggttgagcccaggagttcgagattatcctgggcaatatagtgagaccccccatctctacaaaaactacaaaaattagctgggtatggtggcatgcacctgtagtcccagctactggggaggctgaggtgggaggatcgctcgagcccaggtgatcaaggctgcagtgagctgtgatcacatcactgcactccagcctgggaaacagagtgagaccctgtgaaagaaagaaagaaagagagaaagagagaaagggaggaagggaggaagggaggaagggaggggaagggaaggaggaaggaaagaaggaaggaaggaaggaaggaaggaaggaaggaaggaaggaaggaaggaaggaaggaaaaaaaaaaaaaggatcgcacaattggctgcttgtcctgaagtgtttcctatggtctaaatgttgctgatcctacactcattgtgtagttagttcaggatgttcttctgtccttggtattccctgcaaattggcggttgcttctagaactggggtcagactcagatttgattactttgacatgactactgatggcgttctgttctttcactaggaggcttgtgatgtttggctgtgcctcctttcctcagtccagtagccatcgagaattaactccttagagattacaaaatagtgatgtcatatctcttgtgtttcttccttctttatttacttatttaattttttttatgagatggaatctcgctctgtcacccaggctggagtgcagtggcacaatctcagcttactgcaacctctgcctcccaggttcaagtgattctccttcctcagcctccctagtagctgggattacaggcttgtgccaccacgcctggccatttcgtccttatttgttagttgaattcttttttttttttttatgcaagatacttcttcttatgtactatctggttttccagtgacacttttagagaagaaaggcaagataaaaacctgattattggccaggtgcagtgacacattccggtaatcccagcacattgggaagctgaggcaggaggatcgcttgagcccaggaggtcgaagttgcagtgagccatgattgagccactgtactgcagcctgggcaacagagtgagaccctgtctcataacataaaatcattatggctggcacagtggctcacgcctgtaatcccagcactttaggaggctgaggcggacagatcacttgaagccaggagttcgagaccagcctggctaacatggtgaaacccttcctctactaaaaacacacaaaaaatttagccaggcatggtggtgcatgcctgtagtcccagctactccagaggctgaggcatgagaatcacttctcttgaacccaggaagcagagattgcagtgagccaagatcacaccactgcacttcagcctgaaagacagagactctgtctcaaaataaaaaagaagagaaaggtaggagggtcagagttatagaaggtgttatgatggaagcagaggggtgtgtgtttgtgtgtgtgtgtgtgtgtgtgtgagagagagagagagagagagagagacagagagagagaaaaggagattggaaattgcggccagagtggtggctcatgcctgtaatcccagaatgttgtgaggctgaggcaggcggatcacttgagttcaggagttcgagaccagcctgaccaatatgttgaaaccctcgtctctactgaaaatacaaaaattggccaggcgcggtggctcacgcctgtagtcccagcactttgggaggccaaggcaggcggatcacgaggtcaggagattgaaaccatcgtggctaacacggtgaaaccccgtctctactaaaaatacaaaaaattagacgggcgtggtggcgggtgcctgtagtcccagctactcaggaggctgaggcaggagaatggcatgaacccgggaggcggagtttgcagtgagccaagatcgcaccactgcactccagcctaggtgacagagcgagactccgtctcaaaaaaaaaaaacaaaatttagctgggcattgtggcgtgcgcctgtaatcccagctcttcaggaggctgaggcaggagaatcacttgaactcaggaggcagaggttgcaatgggctgagagtgcagtattgcactccagcctgtggtggtgggcgcctgtaatcccagctactcagaatcccaccacaggtgctcagcacacagtagacactcaataaattttcactgaatggaaagattgaaaggtgatttcaagctccctgcagaccaagaatttctgaagagtattcctgcctagctagccagtggggagaggtataagaaagaaaaggggccgggcacggtggctcatgcctgcatgcccagcaatttgggaggttgaggtgggcggatcacctgaggtcaggcgttggagaccagcctggccaacatggcgaaaccccatctgtactaaaactaaaaaatgtatccgggcatggtgctgtgcacctgtaatcccagctactcaggaggctgaggcagaggtttcagtgagcgaagatcgcgccactgcactccagcctgggtgacagagcgagactctgtcaaaaaaaaaagaaagaaagaaaagagagacaaagaaagaaagaaagaaagaaagaaagaaaggagggagggagggaaggaaggaaggaagagagaaaggggggaaaagaagaaagaaaaagagggagggagggaaagagaaagaaagaaaaagaaggaaagaaaaaggaagaaaggagggagggagggaaggatggaaggaagaaagagagaaagaggggagaaaagaaagaaagagagagagggagggacggaaatagaaagaaagaaagagaaagaaagaaagaaggaaagagaaagaaagaaagaaaaggaattttgcttgcgtgggtgaggaagatgctcttagacctcttaaacaacttccctcctcccccacattcctaataccctgggtgttcatggtagaaaatgtgacccttctctctcccaccctgtcccaggctgaggcttgagtcagaaaagaaaagagagagggaggaggttcccgggcactccagaatacattgaaccccttgggagccactttcagctcctttgccattttaggggcctcctggaaactccaaggcacccctgcccccatctggaatgcttaactgcccagagagactgcgcctgtctctgaacagttttttttttttttttttttttttttttgagacagtctcgctctgtcgccaaggctggagtacagtggcgcgatctcagctcactgcaagctccgcctcccgaattcaagcaattcttcagcctcagtctctccagtagctgggattacaggcacctgctatcagcccagctaattgtttgtatttttagtagagacagggtttcaccatgttggcgaggctggtctcaaattcctgacctcaggtgatccgcccacctctgcctcccaaaatgctgggattacaggcgtgagccattgtgcccggcctgtctcagaacattgacacccctgacatgagagctaattggccccagtcaggagcttcaaaagacagcattggccagttgtggtgtgcatgcctgtaatcctagtgcctcgagaggctaagacaggagaattgcttgaggctgagagtttgagaccagcctgggcaacaaagcaagaccctgtctctagaaaatttatttatttatttttgagacagagtcttgctctgtcgcccaggctggagtgcagtggcgcaatctcggctcactgcaagctccgcctccagggttcaagcaattcccctgcctcagcctccctagtagctgggattacaggcacctgccaccatgcctggctaattttttgtatttttagtagagatggggtttcaccgcattagccaggatggtctccatctgctgacctcgtaatccacccgcctcgacctcccaaagtgctgggattacaggcatgagccactgcacccagcagacatttttaaaaattagctggggatggtagcatgttcccgtagtcccagctactcaggatgctgagatggcagaattgattgagcccaggaatttgaggctacagtaagctatgatcacgccactgcactgcagcctgggccaagagcaagactgtctcaaccggggtgcagtggctcacgcctataatcccagcaatttgggaggctgaagcgggtggatcacttgaagtcaggagtttgagaccagcctggccaacatggtgaaacctcatctctactacaaatacaaaagttagtcgggtgtggtggcgtgcgcctgtagtcccagctacttgggaggccaaggcaggagaatcccctgaacccgggaggtgtaggttgcagtgagccgagatcgcgccactgtactccagcctgggcgacagagcgagactctgtctcaaaaatcatcatcgtcgtcatcatctccacttcccccttgatttactcagtcttctcgagcctcccacagcgggcgggcagccgccaggaggccttgaacttcctctcaggcgcctgggatcagcgggaaaggagcgcgtctgagcggccagaacagctgctctcgagttcaccaccagagggcgctgctatctagggtaaaccccccggggccgcggttgtcaaaccgggtatatacagagaaggaattttcggggtggggggtagtgggggaatctatctctagctttttcttattgttgtaaaaataatttcccaaaaataaaaataggctgggcgcgatggctcacgcctgtaatcccaacactttggaaggccgaggcgggtggatcactggagatcaggagttcaagatcaacatggtgaaacccagtctctgctagaaatacaaaaattagccgggcatggtggccagcagctgtaatcccagctactcaggaggctgaggcataagaaccccctgaagctgggaggcataggtagtagtaagtcgagatcgccccactgcactccagcctgggtgacagaacaagacgctgtctcaaataaataaataaataaatcgtaaattacaaaacaatgacaagctttaaaaataggccaggtacggtggctcacgcctgtaatcccagcactttgggaggccgaggcgggcggatcatgagatcaggagatcaagaccatcctggctaacacggtgaaaccccatctctactaaaaatacaaaaaattagctgggcctggtggcgggcacctgtaatcccagctactcgggaggctgaggcaggcgaatggcatgaacccaggaggtggagcttgcagtgagccgagatagtgccactgcactccagcctgggcgacagagtgagactccgtctcaaaaacaaaacaacaacaaaattaaatgaaaaataaaataaaagaggtcacggttttgggcaccgttaattccagctagtgagcaggctgagatgggaggatttcttgggcccagtagttccaatccagccttggcaacacagcaagacatcccaccaccaccccacgtgccctcccccgccaccgtcttaaaagacagaaagagagattcaatggtttggaactaaagagaactaggttcaaatctttttttttatctctttttttgagatggattctggctttgtcacccaggctggagtgcagttgtgcgatcttggctcactgcagcctctgcctcctaggttagagcgattctcctgcctccgcctcccaagtagctgggaggtagcactcaccaccatgcccagctaatattttgtatttttagtagagagaagttttcaccaggttggcctggctggtctcaaactcctgatctcaggtaatctgcccacctcagcctcccaaattgctggaattacagacatgagccaccacgcctggcctaggttcaaatcttgacccttctgagctgtgtgactttgtccaaattcctaaaggtctcagaagctcaatttatctcctttcagggaccgacttgaggttgagataaaatggattacacaagtgtctgatggtgtaaaggtggcactaaataaatgtacgctgctacagttattatttccttagtgacttcatagctgtctgccctgcaatgtacaagttcccagactggaaggaattatggggaaaagctaataggggagggtggaaaggcaaccccgttcccttctgagcaccagcccagattctgagtcatcctttctgccctgagtgtttgaggtcctgctcttgggctgacctttcttggtgacctggatgtgagtacagtgtggcaggaagactgtggttagttgctgggggcggtagaggccagtcactggacacgatgtgccattacatagtcctaacaaccttgtgggcttgtctgagaagaatcctgcatgtctcaagccagagagaatttttcatgctcttccttgaacctgagtcatctatttcctgtacactttgtctaggactctgtcaagcatctctcagtcttaggacccctgctccaggaatccttacctaatgggattgacatcttttctatactcttctaggcctgtgtgcttaccccattgcagcattgaccatctaggattcaacttatgtagttaaatcttagcaccattcatggtgccaatgagcaaacagatatcatgtgcctcctgatatcatacactgagaaggacacaacatcactgccaaaaatacataacaggcaccttaaggggaagaaacatctgcatcagacaaatgcaaaatggaggacgtgctacaaaaaaccggtgtgtacatctcgaaaatatcagtgtttggccaggcatagtggcttatgcctgttgtcccagctactcaggaggctgaggtgggaggatcacttgagcccaggaggttgaggctgcagtgagctgtgatctcactgctgcactccagccttggtgacaaagtgagaccgtgtctcaaaaaatgccagtgccctgcctggtatagcgaatgcacctgtattcccagttactcagtaggctgaggcaggaagattgcttgagtccagatttgagaccagcctcggcaacataacaacgaccctgtctcagattaaaaaaaaaaaaaaaaaggaccaacaggatatgacaatgaaatgcagtggatgattctggatagggtcctgctcataaaaaacatggctgtgaggccgggcgcggtggcttacgcctgtaatcctagcacattatagtgtatccgggaggatcatgaggtcagagttcgagaccggcctgaccaacatagtgaaaccccatctctactaaaaatacaaaaattagctgggcatggtggcgtgtgcctgtattcccagctactcaggaggctgaggcaggagaattgcttgaacccaggaggctgaggttgtggtgagctgagatcatgccactgcattccagcctgggcaaaagagggagactcagttttttttaaaaaaacaaaacaaaacaaaaaacagctgtggccaggcacagtggctcatgcctgtaatcccaggtctgtgggatgccggggtgggaggatcgcctgagttcaggagttcaagtttgagaccagcctgggcaatgtaactaaaccctgtctctaccaaaaaataccaaaattagcctggtgtggtggcatgtgcctgtagtcccagctgctcaggaggctgaggcaggaggatcacttgagcccaggagttggaggctgcagtgagctataatcgcaccactgcactccagcctgaatgacagagtgagaccctgtctccaaaacaaaggaaaacaaacagaaacacaaaccacagctgttcaggtcatgcttgacacaattgatgaaactggaatatggaccatagattagataacagtactatgtcagggtcaaatttcctgaaattgctagctgtaccacggttatataaacacttttttttcttagtaaagggcaaaaggcacacgttatgtgtgcaatatatccttaagtgggtcagaaaaagaagatgtacaaaaaagtgtgtattatctcaccctgcatgagtgtattatataaatatataagaatacgtctctatgtgagtgtattttatctatctatgcacttatgcacttatgtattacgtatacgtgtgtgtgtgttgttgttgttttgtttcttgttttttttgtttttgagacagagtctcgctctgttgcccaggctggagtgcagtggcctcatctcggctcactgcaagctccacctcctgggttcacgccattctcctgcctcagcctcctgagtagctgggactacaggtgcctgccaccacgcctggctaattttttgtatttttagtagagacggggtttcaccatgttagccaggatggtctcgatctcctgacctcgtgatccacccgcctcggcctcccaaagtgctgggattacaggcgtgagccatcgcgcccggccttttttttttttgagatggagtcttgctctgtcacccaggctggagttcaatggcgcagtcttagctcactgccacctctgccttccaggttcaagcgattctcctccctcagcctcccgaggagctgagtttacaggcctgagccaccgtgccagacctcttttttttttttttttttttttgggacagagtctcactctgatgcccaaatgggagtgcaatggtacgatcatagcagactgcagcttccacctcctgagcttaagttgtcctcttgcatcggcctccttgagtacgtgtgggagtacgggtaggcaccaccacacctggctaattttttattttatttatttttttatttttatatttatttatttattttgagatggagtttcgctcttgtcacccaggctggaatacaatggcacaatcttggctcactgcaacctctgcctcccgggttcaagtgattctcctgcctcagccccccaagtagctgggattacagatgccaccatgcccggctgatttttttttgtattttcagtagaaatggggtttcaccatgtcagccaggctggtcttgaactcctgacctcaggtgatccgcctgcctcggcctcccaaagtgctaggattacaggcgtgagccgccacgcccagccctaatcttttattttttggagggatggggtctcactttgttacccaggctggtctgaaatccctgatttcaagcaatcctgccacttcagtctcccaaagtgtcaggattacaggtgtgagacaccctgcccagcctgtttgtgtatgttatatatatgtatctctctgtatgtaagtgtggctctctccatatatgtatatatatatctttatgtgtattgcatatgtatgtgtctctgtgtgtattatatatatttatattttatgtctctatgtgtgtttatttattttttggatacagggtcttgatctgtcccctaggctagagtgcaggggtgcaatcttggctcactgtagctttgagcctcgacttcccaggttcaaatgatcctcccacctcagcctcccaagtagctcatactacaggaatgtgccaccacgcctagctattttttttttttttgagacagagtcttgctctgtcacccaagctggagtgcaatggtacgatctccgcttactgcagcctccacctcctgggttcaagcgaatctcccacctcagcctcacaaatagctgagattacggccacacaccaccatgcctgctaatttctgtatttttagtagagatggggtttcaccatgctggccaggctggtctcgaactcccagactcaagtgatccacccacctcagcctcccaaagtgctaggattacaggtgtgagccaccatgccgggccccagctaatttttttttttttttgagacagagtctcgccctgttgcccaggctggagtgcagtggcgcaatctctgcttactgcaccctctgcctcccgggttccagcgattctcctgccccagcctcccgagtaactgggattacaggcgcgcgcctccacgcctggctaatttttacatttttagtagagaccgggtttcaccatgttggtcaggctggtctcgaacttctgacctcacgatctgcccaccttggactcccaaagtgctggtattacaggcatgagccaccgtgcccagcctggccccagctaattttttaaattttttgtacagacagggtcttgccatgttacccaatcttgaactcctgggctcaagcagtcctcccaccttggcctcccaaagtactgggattacaagcatgagccaccttgcctagcttaatggcatttacatttgtagtgaaatacacataacaggctgggcgcagtggctcatacctgtaatcccagcactttgggaggccgaggtaggcggatcacctgaggtcaggagttagagaccagcctggacatggcgaaaccccgtctctactaaaatacaaaaattagccaggcgtggtggtgggcacctgtaatcccagctactcgggaggctgaggcaggagaatcatttgaacccaggaggtggaagttgcagtgagcagagattgcaccactgcactccagccttggcgacagagcaagactctgtctcaaaaaaaagaaaaaaaaaagaaaagaaaagaaaaaaaagaaaaagaaaaaaagaaatatacataatataaaattggtcattttaacaatttttaactatgttggccaaagtagcccacgcgttgggattggagacccggtcttgcccaccgtgatcgccccagtacagtgcctggcatatagtaggtgctccaggaacaattgatcaggatgactttgtctttgctgggtaagaggccacattctaaaggtcagtttttggccaggcacagtgactcacacctgtcatcccagcactttgggaggccgaggcgagtgaatcccttgagctcaggagttcaagaccagcctgggcaacacggcaaaaatcctgtctctacaaaatctacagaaattaggcaggtctggtggcacatgcctatagtcccagctgcttgggaggctgaggtgggaggatcacttgagcctgggagtttgaggttgcggtgagctgtgattgtgacactgcactccagcctgggtgagtgagacccatctcagaaaaaaaaaaaaaaatacataaaacagggctgggcgtggtggctcatgcctgtaatcctagcactttgggaggctgaggtggtggatagcctaagcttaggagtttgagaccagcctgggcaacatggcgaaaccccaccccctctactagaatacaaaaaattagcgggcgtggtggtgggcacctgtagtcccagctactcaggaggctgaggcaggagaatggcgggaacctgggaggtggagcttgcagtgagccgagatgaggccactgcactccagcctgggcaacagagcaagactctgtctcaaaaaaaaaaaaaaaaaaaaggctaggccaggcacagtggctcacacctgtaatcccagcacgttgggaggccgagacaggtggatcacctgaggtcaggaatttgagaccagcagagccaacatagtgaaaccccgtttgcactaaaaatacaaaaaattagtcaggtgtggtggtgcacacctgtaatccccgctactcgggaggctgaggctggagaatcgcttgaacctgggaggcagaggttgcagtgagcggagattgcgccgttgcactccagcctgggcgacaagagggaaactccatctcaaaaaaataaataaataaaataaaaaataggctgggcgcggtggctcatgcctgtaatcccagcactttgggaggccgaagcgggcggatcacgaggtcaggagatcgagaccatcctggctaacatggtgaaaccctgtctctattaaaaatacaaaaaattagctgggcatggtggcaggtgcctgtagtcccagctactcgggaggctgaggcaggagaatggcactaacccgggaggtggagcttgcagtgagccgagattgcgccactgcactccagcgtgggcgacagagcgagactccttctcaaaaaataaataaataaataaataaataaataaataaataaaaaataaagagcagtttttagaataaaatctagagccaacttgaggcgacagtatagactcttttgtagattgctcacagcaggtgcccttaagaccctgggtctgtgatgtgttttgtgctgtgggacacatggctccaaagaagtccctgaaaatcagatcatgaaaaggtcatcaggttggggaagtaattgatcagttctctcagtttaagaaggtggggaagaggaggagcttgcattctgggatagcctgggatagctgtgtccctactcagagagaggctgggggcttgggggtggacaggccagacggtgaccatctgaacctactcctcactggggttttcctccctccctttcctgtccactgctgctgggagggatttgctgtcctggcatctggcccagctgacggggccaagtgtatgagtggcagcctgcacgtcagcccttgggtgtgcagtttcagattccagagaatgagctggcttggagccctgctgagtcaatgcccttctccttgccagtgctctgagccaacctgccccgagttcttcctggcaggctggttttctgtgccagcctccccttcctgacagggtataggggaatgggtagggaagaggcagaggagatcggtgcaagtttgaatgaacacttagccctgtggaatgaatgtggtccagccctttagcctcactcagtacttcctttgtcccaactctatccctaccccaggctcagaatgttggggtatctccacctgcctgagaacttcaaacatacaggggctgggcttagagggcagcagcaccttcgttcagtgcatgagtgaatgaatgaatgagggagagaaagaggaaggtcttccatgtctgaaacttttttttttttttttgacacacagtctcactctgtcacccaggctggagtgctgtggtgcaatctcagctcactgcaacctccgtctcctgagttcaagcgattctcctgacacagtctcccgagtagctgtaagcacgtgccaccacacccggctaattttttatttttagtagagacgaggtttcaccatgttggccaggctgatctcgaacccctgacctcaggtgatccgcccccccccccctcccaccacccggcctcccaaagtgctgggattacaggcgtgagccaccgcgcctggccacagacttttattttatttcttttttagagacaggatctcactctgttgcccaggctggagtgcagtggcaccattgtggctcactgcagcctctacctcctgggctcaagtgagcctcccacctcaggctcccaagtagctgcgaccacagtcatgggcgaccgccctggttcctcccttccttgtgtctcctctttctgttctctaagttcctgctttattataggcaaagctcaggacattaaagaccctggcggtagagggtaggctatgggggtgaggccctgatccaagtcctgccgctaaggcactcataatttcgggctcaggggagaaatggaagtcaaagaatctcataaacacagctgcgatgacgaaccctttcacgggaaggaacatgcgagcccagaaaagtctctcctggtcttgggatggaggtcacacgaagcctccgcaaggcaaggacttttggtgagttccgggctccgctgaactcagctctttttcttttccttcctttctttccttcttcctttctttccctccttccttccttcctctttctctctttcctttctctctctcttttctctctctctctccttcttccctccctccctacctctctctcttttctttttccgtccttccttccttctttccttctttctctctcttttctttcttttcttttcttttctcttctttcattttgagacgtactctggctctgtcgcccaggctggagcgcaatggcgccatctcggcgcactgcaacctccacctcccgggttcaagcgattctactgcctcagcctcccgagtagctgggactacaggcgcgcactaccaagcccggctaatttttttttgtatttttagtagagactgggtttcacgatgttggccgggctggtctggaagtcttgacctcaagcgtgcgccctctccgccactgggtaaggcgggggcggaatagggggcttgcaatttcacactagaggcgggcaccgtgggggaaagaagagtcacgtctcccacggttcgtagaggaaggcctgcctgagcctggagcgggggcgggagagccacagtttggcatccccagggcatcccccagcccgcagactaccaggcctccagaggacaggaccccacccccggccacaggccctgcccccagcactccccgcaccccgcctccaagactcctccgcccactccgcacccaacttataaaaaccgtcctcgggcgcggcggggagaagccgagctgagcggatcctcacacgactgtgatccgattctttccagcggcttctgcaaccaagcgggtcttacccccggtcctccgcgtctccagtcctcgcacctggaaccccaacgtccccgagagtccccgaatccccgctcccaggctacctaagaggatgagcggtgctccgacggccggggcagccctgatgctctgcgccgccaccgccgtgctactgagcgctcagggcggacccgtgcagtccaagtcgccgcgctttgcgtcctgggacgagatgaatgtcctggcgcacggactcctgcagctcggccaggggctgcgcgaacacgcggagcgcacccgcagtcagctgagcgcgctggagcggcgcctgagcgcgtgcgggtccgcctgtcagggaaccgaggggtccaccgacctcccgttagcccctgagagccgggtggaccctgaggtccttcacagcctgcaggtacgtgtccccagggctggttctccgcgcccctagtggctctcctggcttggaagggtatggacaggagtggggcgtgggggcggggtgcgcaactgtggctccctgggcttccctgcgtcaagggatgggctccccccttaggaagccgaggagggaggttcgctcaaggccaggaattcaagaccacctaaagcaaaatagcgagacccccgtctcttctacacacacacacacacacacacaaaataaataaaataaaataaaataaatataaaattaaaaaacgaccgggcgcagtggctcacggagcctccacctgctgtcgagactagcctggccaacatggagaaacctcgtctctactaaaaatacaaaaaattagcctggcatggtgtgcatgcctgtaatcccagctacttgggaggctgaggcaggagaatctcttgaacccgggaggcagaggttgcagtgagccgagatcgcagcactgcactccagcctgggcaacagagtgagactcctcaaaaaaataatagcgataaaataaaaataaagccaggtgcggtgactcacgcttgtagtcccagcactttgggagggcgaggccagtggatcacctgaggtcaggagttcaagaccagcctgaccaacacagtgaaaccccgtctctactaaaaatacaaaaattagctgggtgtggtggtgggcgcctgtaatcccagctactggggaggctgaggcaggagaacctcttgaacccgggaggcggaggttgcagtgagccgggatcatgccattgcactccagcctgggcgacagagctcgactccatctcaaaataataataataataaataaaataaaatacaaatacaaaaattagccaggtgtggtggcagctacttgggaggctgagacacaagaatcacttgagtctgggaggcagaggttgcagtgagccaagattgcgccactgcactccaacctgggtgacagagcgagactctgtctgaaaaaataaaaaataagccaggcatagagctgcatgactgtagtcccagctacacaggaggctgaaaacaggaggatcgcctgaccccaggagttggaggctgcagtgagctgtgacagcaccactgcactccagcctgggcgagagaacgagaccccgtcattgggaaaaaaaagaaaaaagaaagactcccttgcctggcctcagcggatggagatttggaaggatggatgagtggatgaattaagaggttggggtaggcaagctgggtcctcaccaaggttttcacccctccccagacacaactcaaggctcagaacagcaggatccagcaactcttccacaaggtggcccagcagcagcggcacctggagaagcagcacctgcgaattcagcatctgcaaagccaggtaaccctaggatcaagggagaaaaggtccctctgatagctggaccccaggttgagagggaggtggtgagaactggacgtgtggctggggacgtggggccaggcaggacctgacaccctcctcccgtcccatcctagtttggcctcctggaccacaagcacctagaccatgaggtggccaagcctgcccgaagaaagaggctgcccgagatggcccagccagttgacccggctcacaatgtcagccgcctgcaccgtgagtgtctgcccctcgatgctctccggtggccacccctaccccgccacttgccattgctggtcctctccttgtcaggtccaccttaaggagaagatgtcctggcctggagtccctgagggctcaccagtctctgggtcaaagctgatgggagcacctccttcctcagccctgacctggcccagccaggccacccaacccttctcctctgcaagccagtgggctgtccctgaagccctgctgatcactgattggaacagaggtggagaaagaggtcttgagggacttgagctgcaggggtgctggagaaggtagaaatggggttcggggtgccatcctgaaggttagaaccttctaggggagggtgtcatggaggagggggtgccaggtagtagtgtttgtagatttgggccctccacaatgtcttggggtatgtgggaattagggctgggaacccccagctcccagaccagaaacactcttgtatcttacaaatccaatgctccaggtccctgacccctcttcctccttcctctcttgttctcctcctccctccccgcccccgccggccccctccccaccgcagaaagtgggcttttgctgccaccacaagttgtaggtgctttattcccaaatctccgttcatctcgaaccacagcatgtccacgtgtgtccgatgcagactcgcggttctctaagttcacggccccacacggtttctctgtggtcctcatccttccctgcatctgtggctgtccacagccaactgggtgaaagtttggatccccctctcacaccctagggtcagtggcaggcttccagcactgtagacctgagggttctctcctccccaagctcccgctccttcccacctccgtgctgcccgcccccaaccccgccaggctagcatctcagcgtggtcagggtcctgtccaccctcccaaagccaccatcccaggatgaggggcttctggagggtgacgggggaaggcacaagtcctggctgggaaatgcggtggaagggggcaggggttctgtgggttcgggactcccagactcttggctcaggcccgccaagtaggagaaagttcagagctgggaaggcgaacagctggcattcatggaagccacactggtggtttggccgcgtgcccatccttactggatgggaggaaagtaggggaaaggggagatgcctgaggggccggaaagcgtcttcctggtcactctgggcccgcccccacccccaccgtgcagactcatttcgacctttcccctacttttccggctgggctgggggcggttcctcccagtctggagcgtctgagcctccagacgtgctcaacgccatcctcccctcctccctccctctttctttcctcaaccctgcctcctctccctctaggagctgggaccccaggcagagcctctgagatgctcctgctcagcacagttcttcccgttctggacctgctgcctcattcattcattcattcattcatttgtcaagactgttttgtttgctttttgagacggagtctcgctctgttgtccaggctggagtgcagtggcgcaatctcagctcactgcaacctctgcctcccactgggttcaagtgattctcctgcctcagcctctcaagtagatgggattataggcgcctaccgccaccacgcccagctaatttttattcatttatcaagtcttttttttttttgagacagagtctcactctgtcacccaggttggagtgcaatggttcaacctcagctgactgcaacctctgcctcccgggttcaagtgattctcctgcctctgcctcctaaggagctgggattactggcgtccaccatcacacccagctaatctttgtatgttttactagagatggggtttggccatgttgaccaggctggtctcaaactcctgaccgatccgcccgcctcccaaagtgctggattacaggcatgaaccactgcgcccggcccattcctcaagtctttattgagcagctgctatgcgctggggcctgcgtggatgctggtgccaggctgtgggcagagctgctccttgtccccagcctcatggagcctccattgagtcagaggagagaccattagatgacctcagtgtccaggagtgggaagtccttgctcaattcccatttggggtgttctggcctggtctgggggtgaggcaaggcagggtgtccttccagaagctgggacccagagagagaagtgaggaaagagagtcccgccgggcgcagtggttcacacctgtaatcccagcactttgggaggccaaggctggcggatcacgaggtcaggagatcgagaccagtctggccaacatggtgaaacccccgtctctacaaataatgcaaaaactagtcgggcgtggtggcacatgcctgtagtcccagctgctccggaggctgcggcagaattgcttgaacctgggaggcggaggttgcagtgagccaagattgcgccactgcactccagcctggcgacagagcgagactccgtatcaaaaaacaaaacaaaaaaagagagtcccaggcagggggaacagcatgtgcaaagtccctgtggcaggacggtgtgtggtacaagggtgggaagaaagcctgtgtgccagagagggtgtgggtacagcatggcaggaggaggatgggcacgggggctggtcctccaggtgccttgtggaccatgctgaggaaggacatagggagccatggaagaggttaggcagatggcagagaggtggtcatgagataagatttgccttttacttccctggtcatccactgttaagcccccagatatgcctggctcctgagaccccccccaggggctgccctcctgtttcaagtctccactttatctcccttcagggctgcccagggattgccaggagctgttccaggttggggagaggcagagtggactatttgaaatccagcctcaggggtctccgccatttttggtgaactgcaagatgacctcaggtagggtgtgttagtccaccaggggcccctctccccataggccctgttgtctttctttaaattgaaaacaaaacaaaacaaaaaaattaaaggcagggtcttgctatgttgcccaagctggtctttttttttttttttttttttgagatggagttttgctcttggagctggagtgcaatgccacgatctcagctcactgaaacctccgcctcccgggttcaagcaattctccagcgtcagcctccccagtagctgagactacaggtgcgagcaaccacacccagctaatttttgtatttttagtagagactgggtttcaccatgttggtctggctggtctcaaactcctgacctcaaatgatttgccgactttggcctcccaaaatgctgggattataggcattagccactgctcctggcctcttttctttaaaatgcagcccttgtctgggtgtagtggctcatatctgtaatcccgacactttgggaggcctatcatgaggatcacttgagcccagaagttcgagaccagcctggacaacatagtgagagctcatctttacaaaaaattttgtaaaagtaaaaaaaaaggccaagtgcagtggctcacacctgtaatcccagcactttgggaggttgaggcagacagatcacgaggtcaggagttcgagaccagcctgaccaacatggtgaaaccccgtctctactaaaaatacaaaaattagccgggcatggtggtgtgcacctgtaatcccagctactcaggtggctgaggcaggagaatctcttgaacctgggaggcagaggttgcagtgagctgagatgacgccaccgcactccagcctgggcgacagagcgagactccgtccccccatcaaaaaaataaaaaagagaaaataaaataaaataaaataaaattcagcccttgctgggcatggtggcacatgcctgtagtcccagctactcgggaggccaaggcaggagggtcacttcagcccaggagttaaaggctgccgtgagccgtgatcacacctgtgaatagccaccgcactccaacctgggcaacacaacaaaacctcgtttctaaaaaaaaacaaaggctgagcacggtggcttacacctgaaatgccagcactttgggaggctgaggcgggcaaatcacttgaggtcagaagttcaagaccagcctggccaacatggtgaaaccctatctctaccaacataaacattagccgggcgtgcctgtgattccagctgcttgtggggctgaagcacaagaatcgcttgagccccgaaggcagaggttgcagtgagctgagattgcggcactgcgatccagcctgggcaacagagtgagactccatctctaaaaaaaaaaaaaaaaaaaaagaaagcttttttttccactgagaagtcctttccattacaagaggttacaacacggggttttacccagttcagctggcccagagaggctttgcagatttccactgcctactccctcccacactcagtccctgctgggttcttgggacaaagatcttcccaaggccagcccataatattcctccctctgacccaccctcctcgagtcctccagggatgagtgagggagctgctgtcttcctgggtttggagggggtttggtgcttggcagccagatgagggagtggggtcgtctgtgaagagggacttcctggtgaccttgtacctttctgggcagatggaggctggacagtaattcagaggcgccacgatggctcagtggacttcaaccggccctgggaagcctacaaggcggggtttggggatccccacggtaggtgtttctagtggggacagaggcaggggaggaagagggaccctcagaagtggccctgcctcatggagtggcctctcccactccaggcgagttctggctgggtctggagaaggtgcatagcatcacgggggaccgcaacagccgcctggccgtgcagctgcgggactgggatggcaacgccgagttgctgcagttctccgtgcacctgggtggcgaggacacggcctatagcctgcagctcactgcacccgtggccggccagctgggcgccaccaccgtcccacccagcggcctctccgtacccttctccacttgggaccaggatcacgacctccgcagggacaagaactgcgccaagagcctctctggtgagcaggccctgccatgccacacccagccagcagcttccctccttatctttctgctgctctgtcctgccttcaaccccacattgcatctgtttcctgcccccacctcttccttacatgccgtgtgtgtgattgggccactaacttagcctatctggcctcagttttcccatcctgaaaagggtcttgaccgtctttacttttatttacttatgtgtttgtttatttatttatttatgtatttattttttgagacggagtctcactttgtcacccaggctggagtgctttgtggcacgatcttggctcactgcaagctccacctcctgagttcacaccattctcctgcctcagcctcccgagtagctgggactataggtgcccaccaccacgcctggctaatttttttgtatttttagtagagatggggtttcaccgtgttagccaggatggtctcgatctcctgacctcgtgatctgcctgcctcagcctcccaaagtgctgggattacaggcgtgagccaccgcgcccggcctacttatttattttttgagacagagtcccgctgtgtctcccaggctggagtgcaagtgacgtgatcttggctcactgcagcctccgcctcctgggttcaagtgattctcctgcctcagcctcctgagtagctgggattacaggttcccgccaccatgcacagataattgttttgtatttttagtagagacggggtttcaccatgttggccagggtggtcttgaactcctgacctcaagtgatctgcccacctcggcctcccaaagtgttgggattacaggcgtgagccacaatacccggccacaaacatctttataatggtgctccacaggattctttttttttttttttttttgaaacagggtctcactctgttgcctaagctggagtgcagtggtgcgatctcggctcactgcaacctccacctcccgggttcaagcaattctcaaaaaaaaaaaaaaattaggcacggtggctcacacttgcaatcccagcactttgggaggctgaagcgagtggatcacttgagcccaggagaccaatctgagcaacagggcgaaatcctgtctcaattaaaaatacaaaaaactagctgggcatggtggtgcctgcctgtgttcccatctacttgggaggctgagttgggaggatctcttgagcctaggagataaggctgcagtgagctgagactgcgccactgcactcaagcctgggtgacagagtgagacccctgcctcaaaagaaaaagaaaaaatgcaggcatggtggctcacacctgtggtcccagctacttgggaggcccaggtacaagaatcacttgagcccgtaaggttgacgctgcattgagccatcaccacaccactgcactccagcctgggcaatggagccaggccctgtctcaaaaaaaattgtttttaaacttaaaaataaggccgggtgtgggggctcacacctgtaatcccagcactttgggaggccgaggtgggtggatcacctgaggtcaggagttcaaaactagcctggccaacatggtgaaaccctgtctctactaaaaatacaaaaattaggccaggcgcagtgggtcatacctgtaatcccagcactttgggaggctgaggagggtggatcacatgaggtaaggagtttgagaccaacctggccaacatggtgaaaccccctcactactaaaaatacaaaaactagccaggcgtggtggcgggtgcctgtaatcccggctactcaggaggctgaggcatgagaatcccttgaacctgggaggcagaggtgcagtgagccgagattgtgccactgcactccagcctgggagatagagtgagactcagtctcaaaaaaaaagaccaaaaattagccaggtgtggtggcaggcgcctgtaatcccagctactcgggaggctgagggaggagaatcacttaaacctgagagacggaggttgcagtgagctgagatcgcaccactgcactccagcctgggtgacagagtaagactcaatctcaaaaaaaaaaaagtcaagtccaaagcccagcctggtccccaacctgcctcatcctcaaccctatccctatctcctttcagccccatcggtggctcaaagacctgaccatgttccctctcccctgaccccggcaggaggctggtggtttggcacctgcagccattccaacctcaacggccagtacttccgctccatcccacagcagcggcagaagcttaagaagggaatcttctggaagacctggcggggccgctactacccgctgcaggccaccaccatgttgatccagcccatggcagcagaggcagcctcctagcgtcctggctgggcctggtcccaggcccacgaaagacggtgactcttggctctgcccgaggatgtggccgttccctgcctgggcaggggctccaaggaggggccatctggaaacttgtggacagagaagaagaccacgactggagaagccccctttctgagtgcaggggggctgcatgcgttgcctcctgagatcgaggctgcaggatatgctcagactctagaggcgtggaccaaggggcatggagcttcactccttgctggccagggagttggggactcagagggaccacttggggccagccagactggcctcaatggcggactcagtcacattgactgacggggaccagggcttgtgtgggtcgagagcgccctcatggtgctggtgctgttgtgtgtaggtcccctggggacacaagcaggcgccaatggtatctgggcggagctcacagagttcttggaataaaagcaacctcagaacactttgttctttgttcttgtttgttttctttcttttttttctctttctttagttcacagatctagtaagttaccctcagtttgttttaaaaagtgaacaaagtccatgtaaacatgttcccagggccaggcacggtgtctcgtgcctgtaatcccagccatttgtgaggccgagacaggcaggtcacttgaggtcagcagttcgagaccagccgggccaacatggtggaacccccatctctacaaaaaaatacaaaaattagccgagcatggtggtgcacgtctgtagtcccagctactctagaggctgacgcagaagaatcacttgagccaaggaggcagaggctgcaaataagccgagattgcgccactgcactccagcctgggcaacagagcaagactccatctcaaaacaaaaataatttttttttcgtagaggcagggtctcattctattgtccaggctggtctcaaacaccgagactcaagggatcctcctgccttggcttcacaaagtgatgggattaaaggtgtgagcgccactgcacccacccctgaaggctctaattctacatctgtgttttgttaaaaaaaaaaaaaaaagatggcgtggtcgctcatgcctgtaatcccagcactttaggaggccgaggcaggtggatcatctgacattacgagttccaggcccgcctgaccaacatggtgaaaccccgtctctactaaaaatacaaaaattagccgggtgtggtggcgggtgcctgtaatcccagctactcaggaggctgaggcaggagaatcacttgaactcgggaggtggaggttgcggtgagcagagatcatgccactgcactccagcctgggtgacagagcaagacttgatttcaaaaaaaaaaaaaaaaaaaaaaagaatagggctgggcgcattggctcacacttgtaacactagcactttgggaggccaacgagcggatcacccgaggtcgggtgatcccgctgtattgctctatatagtgagatccctatatagggtctcactctattgtccaggctggtctggcctggccaatgtggtgaaacctcatttctactaaaaatacaaaaattagctgggcatagtgatgcgcacctataatcccagctactcaggaggctgaggccggagaattgcttgaacccaggaggtggaggttgcagtgagccgagatggcgctgagaggtgacagcgtgctggcagtcctcacagccctcgctcactctctgcgactcctctgcctgggctcccactgtggcggcacttcaggagcccttcagcccaccgctgcactgtgggagcccctttctgggctggccaaggccggagctggctccctcagcttgcagggaagtgtggagggagaggcgcgagccggaatcggggctgcgcgcggtgcttgtgggccagctggagttccgggtgggcgtgggcttggcggaccctgcactcagagcagccgtccggccctgctggccccgggcaatgaggggcttagcacccgggccggacagcggctgcggagggtgtactgggtcccccagcagtgccagcgcaccggcgctgcgcttgatttctcaccaggccttagctgccttcccgcggggcagggatcgggacctgcagcccgccatgcctgagcctcccaccccctccatgggctcctgtgcggcccgcgcctccctgacgagcactgccccatgctccatggtgcccagtcccatccaccacccaagggctgaggagtgcaggcgcacggcgtgggactggcaggcagctccacctgcagccccggtgcaggatccactgggtgaagctagctgggctcctgagtctggtggggacgtggagaacctttgtctagctcagggattgtaaatacaccaatcatcaccctatgtctagctcagggtttgtgaatgcaccaatgaacactctgtatctagctactctggtggggccttggagaacctttatgtctagctcagggattgtaaatacaccaatcggcactctgtatctagctcaaggtttgtaaacacaccaatcagcaccctgtgtctagctcagggtttgtgaatgcaccaatcgacactctgtatctagctactgtggtggggccttggagaacctttgtgttgacactctgtatctagttaatctggtggggatgtggagaacctttgtgtctagctcaggaattgtaaacgcaccaatcagcgccctgtcaaaacagaccagtgggctctaccaatcagcaggatgtgggtggggccagataagagaataaaagcaggctgcccgagccagcagtggcaacccacttgggtccccttccacactgtggaagctttgttcttttgctctttgcaataaatcttgtactgctcactctttgggtccccactgcttttatgagctgtaacactcactgcgaaggtctgcagcttcactcctgagccagtgaaaccatgaacccaccagaaggaagaaacgctgaacacacctgaacatcagaagaaacaaactccagacgcgccaccttaagagctggaacacttaccgcaagggtccatggcttcattcttgaagtcagtgagaccaagaaccccccaattccggatacagtgccactgcactccagcccaggcaacagagcgagattctgtctaaaaaataaataaataaatatgaaataaaataaaaattgtaataattggataccctacatctaggacatgtatttgaggaaaaccacatctgtccattttctgaaccccagctgctgttaattttttttttttttttttccgagacaagagtctcactctgtcacccaggctggagcgcggtagtgcgatctcagcttactgcaacctccacctcccgggttcaagcgattctcctgcctcggcctcccgagtagctgagattacaggcgcctcccactgcacccagctaatttttgtatttttagtatagatgggtttggccaggctggtctcaaactcctgacctcaagtgatctgcccgcctcggcctccgaaactggtgggattacaggcgcaagccactgtgcccggcctgttaatttatttttgccccagtatctccctccaaatattccttatagatgtctcttggggaggtggtgggggttcttgcgctagaagaaaaaatatctgtgatttccttgtcttgacccttcctggcaggtgctggggacacagctgtttccctggggctgtggctgggtataggtgacaaactttttagctttgtagaggtaggtcctacagctgccaggccagggaggctagaggctgccctctccaggttccttgtttgcctgtgtcctgtactgagcaggcttagaggatctcctctgagcccactgtcactggagctggtggtgagtccagtctgcaggagagggggttcctctagccacaccctcttcatttccaggctctgccaatgatgggctcatctcttcaatgtcatcctttttcctgcagccaccttgacctcaaagcatttcctgcccctccaacctggggaacgacagaaaaaaaaaaaaaaaaaccaccacctgggcacggtggcgcactcctacactccccgcactctgggaggctgaggtgggtagatcacaaggtcaggagatcaagaccatactggctgacacggtgaaaccccgtctctactaaaaatacaaaaaattagccaggcatggtggcacatgcccgtagtcccagctattcgggaggctaaggcaggagaatcacttgaacctgggaggcggaggttgcagtgagctgagattgcaccactgcactccagcctgggtgacagagcaagactctgtctcaaaaaagaaagaaaaaaagaaagaaaagaaaaacaccatggcaggaaactaacaaggggccaggaagctgggatgtgaacctggacctgttaaactccagagctgcagctgtaaatcacatccctctcctggaccacaggagctcactggccccagttcctgcatttggaaaatggggatggttttgacaccccacccctccatgccaccatcccttcctggcctcatggtgtggggagggggtggtaaagaattaataaggcattaatattcatcacaggctgggtccagtgcctcgcgactgtaatcccagctctttgggaggctgaggctggaggaccttggagtttgagaccagcctacgcaacacagcaagacctcatctctacgataaatttttaaaaagtccgggtgcagtggctcatgcctataatcccagcactttgggaggccaaggcgggtggatcatgaggttaggagttcaagaccagcctggccaagatagtgaaaccccatctctactaaaaatacaaaaaaattagccaggtgtggtggtgggcgcctgtaatcccagctacttgagaggctaaggcagagaattgcttggactcgggaggcagagggtgcagtgagccgagatcatgccactgcactccagcctgggcaacagagtgagaccctgcctcaaaaaaaaaaaaaaagaatcaagagaaatttcagagggaggagagacagaataaggcaactgaggatgatagagggagggaggcagagaggagaagatgagacagaagtccatgtcctctgggtttgatgggagggagggaaggaaggatggagacacaagagggggagtggatatggggaaggagtcaaatttgtttatgggattgagaggtgaagccggctaggcttctgggtcgggtggggacttgaacttttctgtctagctaaaggattgtaaacgtaccaatcagcactctgtgtctagctaaaggattgtaaatgcaccaatcagcactctgtgtctagctaaaggtttgtaaatgcaccaatcagcgctctgtgtctagctaatcaggtaggggacttggagaattttctgtctagctaaaggattgtaaatgcaccaatcagcactttgtgtctagctaaagttttgtaaatgcaccaatcagcactctgtcaaaatggacaaatcagcactctaaaacggaacaatcagcactctgtaaaatggaccaatcagctctctgtaaaatagaccaatcagcaggatgtgggtggggccaaataagggaataaaaggccacccgagccagcagcagcaacccactcaggttcccttccacgctgtagaagctctgttctttcactcttcgcaataaatcttgctgctgctcactctttgggtccgcaccacctttatgagctgtaacactcaccgcaaagatctgcagcttcactcctgaagtcagcgagaccacgaacctaccagaaggaataaactccagacacatccaaacatcagaaggaacaaactccagacacaccatctttaagaactgtaacactcaccgtgagggtccacagcttcattcttgaagtcagtgagaccaagaacccaccaatactggacacattttggcgaccacgaagggactatcgcctatcaccaagcggtgagactatcgcctatcaccaagcggtgagtaccatcggacccctttcgcttgctattcgtcctatttttccttagaatttgggggctaaataccgggcacctgtcggccagttaaaagcgactagcgcaggtgctggactaaagacatgggtgtgaggctttctgggaaggggctctctaacaaaccccgactttttggagttgggagcgttagtttgcctggaaccagcttccgcttttcctgtacttctgggctgagtcgagggttgacaggaaagccattcagctctggggtcttgacaacaagttggttgatcctgtggccatgagcagaactctcaaagtcatgtcgcccaagtgagactcgcccatctatcctatctgtcctgacccttgcctcctgggtcctaatgcctgtcagacaaacttcctctcgcctctcttctccgaggctagtcccacctctaaaaaccactccctgtctctggtgcttttctagtttctcctataagaatgacttctagtataaacttcaggactctgttaccttctttaggcacctaggctcactaatcagaaagacataatttttgcccaaagccctgttgtaggggggctatctggaattttaggatccctcctcagacaagcaggactaataaaagctattcctgaagctaggatatggggagcctcagaaattgtattcttcctattcatataagtgaggacaaaaggtgtcactcttccaaccctggagatcccttccttccctcatggtatggccctccacttcatttttggggcataacatcattgtaggaaattggtaaggtcccaatactaaaaggagaatgcttaggactgtaacaggttttcgagaatgtgttggtaagggccactaaatccaatttttctcggtcatctttgtggtctaggaggacaggcaagggtgcaggttttttgagaatgcgttggtaagggccactaaatccgaccttcctcggttctccttgtggtctgggaggaaagctactgtttctgctgctgcgttggtgagtgcaactattccaatcagcagggtctagtgaccattacgggttcttgggcaggggttgtttctgctgctgcatcagtgagcgcaactattccgatcagcagggcccaaggaccattgtggattcttgggcagggggagaagaaaaacacaccaaaatcgtgggtggttttgtctttcagatgggaaacaggcatcaacaggctcacccttgaaatgcatcctaggccattgggaccagtctgacctgcaaaccctgaaaaagaggcagctcatttttttctgcactgtggcctggccccaatattctctctctgatggggaaaaatggccatctgagggaagtacaaattacaatactatcctgcagcttgaccttttctgtaagagaaaggcaaatggagtgaaatagttatgtccaagctttcctttcattaaaggagaatacacatctatgcaaaggttgcaatttacatcccacaggagaacctttcagcttacccccatatcctagcctccctacagctccccttcgtattagtgacaagcctcctctaatctcccctgcccagaaggaaataagcaaagaaatctccaaaggaccacaaaactcccctgggctgtcggttatgtccccttcaaattgtagcgggaggggaatttggcctaacatgggtacatgtctacttctccctctctgatttaaagcagatcaaggcacacctggggaagttttcagatgatcctgataggtacatagatgtcctacagggtctagggcaaatcttcaatctcacttggagagatgtcatgctattgttagatcaaaccctggcctttaatgaaaataatgcagctttagctgcagcccaagactttggaggtacctggtatcttagttaagtaaatgatagaatgacagctgaagaaagggacaaattccctactggtcagcaagccatccccagtatggatccccactgggacttcaattcagatcatggggactggagtcataaacatctgttgacctatgttctagaaggactaaggataattaggaagaagcccatgaattattcactgatgtccaccataactcagggaaaggaagaaaatccttctgccttcctcgagtggctacagaaggccttaagaaaatatactcccctgtcacccaaatcactcaagggtcaattgatcctaaaagataagtttattatccaatcagccacagatatcaggagaaagctccaaaagtgagccctgtgccctgaacaaaatctagaggcattattaaacctggcaacctcactgttctataacagggaccaagaggaacaggcccaaaaggaaaagtgagatcagagaaaggccgcagacttagtcatggccctcagacaaacaaaccttggtggttcagagaggacagaaaatggagcaggccaatcatccagtatggcttgttagcagtgtggtttgcaaggacactttaaaaaagattgtccaatgagaaacaagctgcccccttgtccatgtcccctatgccaaggcaatcactggaaggcacactgccccagaggacaaagcttctctgggacagaagcccccaaccagatgatccaacaacaggactgagggtgcctggggcaagtgtcagctcatgtcatcactctcactgagccccaggtaactttaaccattgacagccaggaaattgacttcctcctggacactggtgcggctttctcagtgttaatttcctgtcctgaacagctgtcctccaggtccgttaccatctgaggaatcctgggacagcctgtaaccaggtatttctcccacctcctcagttgtaattgggagactttgctcttttcacatgcctttcttgttatgcctgaaagtcccacacccttattagggagggatatattagccaaagctggagctattatctacatgaatatggggaacaagtttcccatttgttgtcccctacttgaggatgaaatcaagcctgaagtctgggcattggaaggacaatttggaagggcaaaaaatgcccacccagtccaaatcagggtaaaagatcccaccacatttccttatcaaaggcaatattccttaaagcctgaagcttataaaggattacaggatattgttaaacatttaaaagctcaaggcttagtaaggaaatgcagcagtccctgcaacaccccaattctaggagtacaaaaaccaaatggtcaatggagactagtgcaagatcttagactcatcgatgaggcaataatttttctatatccagttgtatccaacccctataccctgctctctcaaataccagaggaagcagaatggttcactgttctggacctcaaggatgccttcttctgtattcccctgcactctgactctcagtttctctttgcctttgaggatcccacagaccacacgtcccaacttacgtggatggtcttgccccaagggtttagggatagccctcatctgtttggtcaggcactggctcaagatctaggccacttctcaaatccaggtgctctggtccttcagtatgtggatgatttacttttggctactagttcagaagcctcatgccagcaggctactctagatctcttgaactttctagctaatcaagggtacaaggcatctaggtcgaaggcccagctttgcctacagcaggtcaaatatctaggcctaatcttagccagaggaatcagggccctcagcaaggaacaaatacagcctatactggcttatcctcaccctaagacatttaacagttgcaggggttccttgaaatcaccagcttttgctgattgtggatccccagatacagcgagatagccaggcccctctatactctaatcaaggagacccagagggcaaatactcatctagtagaatgggaaccaggggcagaaacagccttcaaaaccttaaagcaggccctagtacaagctccagctttaagccttcccacaggacaaaacatcacagagagagcagggatagctcttggagtccttactcagactcatgggataaccccacaaccagtggcatacctaagtaaggaaactgatgtagtagcaaatggctggcctcattgcttatgggtagttgcagcagtggctgtcttagtgtcagaggctatcaaaataatacaaggaaaggatctcactgtctggactactcatgatgtaaatggcaacctaggtgctaaagaaagtttatggctatcagacaatcgcctacttagataccaggcactattccttgaggggctggtgcttcaaatatgcacatgtgtggccctcaaccctgccacttttctcccagagtatgaggaaccaattgagcatgactgccaacaaattatagcccagaattatgctgcccaagaggatctcttagaagtccccttagctaatcttgaccttaacctatatactgatggaagttcatttgtggagaatgggatatgaagggcaggttatgccatagttagtgatgtaactgtacttgaaagtaagcctcttcccccagggaccagcgcccagttagcagaactagtggcacttacctgagccttagaactgggaaacggaaaaagaataaatgtgtatacatatagcaagtatgcttacctaatcctacatgcccatgccgcaatatggaaagaaagggagtttctaacctctgggggaacccccattaaataccacaaggaaaccatggagttattgcacacagtgcaaaaacccaaggaggtggcagtcttacacagccgaagccatcaaaaatgggaagaagaggggagaacagcagcataagtggctagcagaggcagggaaagaccagcagaaaggaaagagagaaagagacaggaagtcagagaaagagagaagagaggaagaaacagagagacaaagagaaggagacagagaggaagagacagagacaaagaagaagtcaaagagaaaaggagatagaagtagtaaaaaaaaaaaagtgtaccctagcgtaaatttaaaacctataattgataattgaaggtcttctctgtaaccttataacactccaataccaccttgttgtcagtgtaaacaagggcatagccggaaagcactgaggccactgacaacctgtagccttcctatcaaaaatccttaacccagcaggtttcctaacaggagatctaaatcttaattaattaccatacaaaggtctgaccagatctaggaggaactcccttcaggacaggatgatagatggttcctcccaggcgattaagggaaaaagacacaatgggtattcagtaagtgataaggaaactcttgtagatgcagagttaggaaaattgcctaataattggtctgctcaaacatgccagttgtttccactcagccaaatcttaaagtacttacagaatcaggaagcagccatctataccaattctaagttaatatggactgaacaaggtcttactaatagcaaagaataattgaaatcccaaacttacaaggttttcaacaaaagtaaagtttgctaaaaaagttaacagtgtaacatgtattatcctaacttctaatcttatggaaatcagaccgtatctgtgcccctcaaagctcaagtctatcagcgcagggccatacaactaatatccctacttatagggttaggaatggctactgctacaggaaccggaatagccagtttatccacttcattattctactaccatacaccttcaaaggatttctcagacagtttgtaagaaataacaaaatctatccttactctacaatcccaaatatactctttggcagcagcaactctccaaaaccactgaggcctagacctcctcactgctgagaaaggaggactctgcaccttcttaggggaagagtgttgtttttacactaaacagtcagggatagcacgagatgccacctggcatttacaggaaaaggcttctgaaatcagacaatgcctttcgaactctaataccaacctctggagttgggcaacatggcttctcccctaggtcctgtggcagccatcttgctcttactcacctttgggccctgcatttttaaccttcttgtcaaatttgtttcttctagaatcgaggccatcaagctacagatggtcttaaaaatggaaccccaaatgagttcaactaacaacttctactgaggacccctggaccgacccactggcccttccactggcctaaagagttcccctctggaggacactacaattgcagggccccttcttccagcaggaagtagctagagtggtcatcggccaaattcccaacagcagttggggtgttctgtttagaggggtgattgagaggtgaagccggctgggcttcttggttgagtagggacttggagaacttttctgtctagctaaaggattgcaaatgcaccaatcagcgctctgtgtctagctaaaggtttgtaaatgcaccaatcagcgctctgtgtctaactaatcgcgtaggggacttagagaactttcctgtctagctaaaggattgtaaatgcaccaatcagcactctgtgtctagctaaaggtttgtaaatgcaccaatcagcactctgtcaaaacggaccaatcagcactctgtaaaacggaccaatcagcactctgtaaagtggaccaatcagctctctgtaaaatggaccaatcagcaggatgtaggtggggccaaataagggaataaaagcaggacaccgcagccagcagcggcaacgtgcttgggtccccttccatgctgtggaaactttgttctttcactcttcccagtaaatcctgctgctgctcactctttgggtgcgcactgcctttatgagctgtaacactcaccgcaaaggtctgcagtttcactcctgaagtcagcgagaccaaaagcccaccagaagcaagaaactctagacatgtctgaatatcagaaggaacaaactctggacacaccatctttcagaaccgtaacactcaccggagggtctgtggcttcattcttggagtcagcaagaccaagaacccaccaatctggacacaggatgtgttatacaaaacttataggaggctattactttggactgacttcctacaccaggcccaacaaactaaaccaaaatggagtcactcatgctaaagttttacgtgatcaaaaagaaactaagttgtttatctgaccttctacaaaatcaggagagagagagatgggatagccaagtctcccaccaggtcagttttagccatcatgataaggatgtcctctctgctttaacctttacaagaaaagtaactttgggctgagtgcggtggtggctcatgcctgtaatcccagcactttgggaggccaaggcaggaggattgcttgagttcaggagttcaaatccagcctggccaacaaggcaagaccctgtctctggaaaaaaaaaattagctgggcatggtggcacacacctgtgatcctagctcctcaggaggctgaggtgggaagattgcttgatcccaggaagttgaggttgcagtgagctatgatcgcaccactgcactccagcctgggtgacagagcaagactcagactccaaaaggaaactttaaaatgaccaatccaagttttcttttctttttttctttttttttgagtcggagttttgctctgctctcccaggctggagtgcaatggtgtgatcttcgctcactgcaacctccgcctccctggttcaagtgattctcctgcctcaacctcctgagtagctgggattacaggcacctgccaccgcgcccggctaatatttttgtattgttagtagagatagggtttcatcatcattatcatgttggtcaagctggtctcgaactcctgacctcgggtgatctgcctgcctcggcctccaaagtgctgggattacaggcatgagccactgcacctgacctccacgttttattttctgtttgtgctttacttggccctttttctgcctgtaaaaccaacctacctgctcagctcatgggaaaattagtttcattttgtgaaatgaagtgttgcccgattgtagaattgcaaataaaatcaattaagatctttaaactaaatgtgttgtaattttgtttttttgacagatgcccaatgaacaccctgggaatgagatccaagaggcgataatggcatctgctctaataactagtacattgactctaggcttagattattcaccactgaataaataaacgtatttattcagcagtggggaacttacagcaatgatggggacagatacagtccctgatgtcatcaggctgatatgctgctgacagaggacaaaaaacaaacagatcaatgggtcaggaaagcaaggcttttttttttttgagacagggtcttgctctgttacccaagctggagtgcagtggggtgatcatggctcactgcagcctcgatttcccaggctcgaatgatcctcccgccttggcctcccaagtatctgggaccctggcatgatgcaccacatctggctaatttttgttgttgttcttttcttttttttccttttctcttttttttcctttttttctttttttttttttttttttgagagactgggttttgacatgttgcctaggctggtctctagctcctggcctcaagtgatcctcccacctcagcctcctcaaagggcatgtttttaggcataagccaccgcagccagccaaaacaaacaaacaaaaagtaacgtatactttgtgttaataattttgcatagtatattgaaaatttgccaagaaagtacattttagatactctcactacacacacagttaattatggaaggcaatggataggttaattgcttaactctcataattggccatgtgtggtgaaaatgcctgtaatcccagcactttgggaggccaaggtgggcgaatcacctgaggtcaggagttcgagatcagcctgaccaacatggagaaaccccgtctctactaaaaatacaaaaaaattagccaagcatggtggtgcatgcctgtaatcccagctattcgggaggctgaggcatgagaatcgcttgaacccgggaggcagaggctgcagtgagccgagagcacaccattgcacttcagcctgggcaacgacagcaaaactccgtctcaaaaaaaaaaaaaaaaactgtcataattattatttcactgggtacatgtgtatcaaaacacacgctgtacaccctaaatatataaaacaaacacatactgtattgtcaggtagtgataaatcctatcactacctgacaatacagcagtatgtgttttattttctatattacctatttttatattttacctatgtggcaaaatataggacaaaagaggggtagtggtaggaggtcctgttggagagcattggtatccagtaaggatttaaaagtatttatttaacaaagaatagcagaaagtggacggttgattcacacttggtgcaatctcggctcactgcaacctccacctcccaggttcaagcgattctcctgcctcaacctcctgagtagctgggtttacaggcaccagcgaccacgcccgactaatttttgtatttttagtagaaacggggtttcaccatgttggtcaggctggtctcgaactcctgacctcgtgatccgccagcctcggcctcccaaagtcctggaattacaggcgtgagccaccgcgcctggctgatctggttattttcaaaagattccatgagacgggtttcttcagtttacagaggaggaaactgaggcacagaaggataacccagtgagtcccaatatagagatggagactgcaaccgagaaaggggacccagcgctgaggtccccggaaatggtcatttatgggcttggggggcgaccagggcagcgcgcgctgacctatgacgtcatcgggacgttaagcatcgtagcattacctggacgtagccccatttctcttcccggacaggtcctctgatagtcgggtaggttctcaatcaagcctctcattagttatttggtctgtcaatccatttcattcctgcagtcttccgccccgccctcttgagctcgcccctgataggctggcgcgtccgtcacttcaaaaaggtccgcattccttccgcctttctccaggacaccgagggcgaggagggtggtaccaagcggcgcccaccctcagagcactacttccatctctgattggcttcgctgggtgcccgtcgctactccactcgccgctgataggccattcaaccgccgctctgcgcggcgccggctccgcccccgtcgggtgtttgtggtggggctgcggagtcgccgatcccgccggaagcgccaggacaatggggacccgggacgacgagtacgactacctattcaaaggtgcggccggtggggcacagacgggcgaagtcgtggcggcgaggcggcgggcagacgggccaaggccgcgctccaggccgctgggcccaggccggagcccggggcttggggcccggcgggtcaggcagccgggaaggccggagccgaccgggcagcatcagcttcgggctaggatgcgcggctatacggagccggaggcccggagagacctgggggacctaggacgcgccggggcggggccagagcctagagggggtggggcccggagcggtgggagaggctgttagggcggggcctccgcagggggtggagctttcccaagatttggcgggccgggctgggctgaaagcgtgattcgggatgggggcggggtttttaggggcggggctaaggcgtgatgggcgtgaccaataggtgggttgggcctgggcaaacggaggcggggctctcacgaggcttgtcctgattggggcagcgtgtttgggggtggggcccgggagaggcggggcaggcaatgggggctgggccgagatgagggcctgggggtgaggtgtgtggtggtgggagccttggattggggtgcaaagctgggattgagtggaaaggcacccgtgtgtgcagcaagaattccatctcttcactcagaactctcaacagtgctaagccagtacttgcacttttctgagcactttacccgaattaactaaaatcctcactgcagccctttgaggttgatactaaccagcctctctttttacacgttgggaaactgaggcccagagtgacaaagacacagtttataagtgttggaacccgattgagcccaggccacctgtaggccttaccacttaggaagcgtgtcttagggggcttgtggccagcatctgggactttgggttgttggaccaacttcttccaacacgtgcgcactgatggccggggccccagccagcctgctggagggtcttccccgcccgagggactgagggggctctaggagcatcacataaggcctaggtagatcaggcagccattgcccatttagggacagctggaggaagccggagtcccttgtttctcagctgagccttctgtgcccagctacactttggcctagtggtctgccctggttgctgggctccctggctgacaatggcagcccttgagggctaacccctggatccaaggtgccttcaccctgcggcctgctctatgagggcctgcgtcgcacatcagctgttggtatcctcacctcgctgagccgttcctccgagtgtgctctgtggcttgcaccaggcctagctgggccttgtgtctggtctcatccagcgtcttctgattgtggggaatgaggcagaggtctccccacctgggctgtccgtgtggcgaaagccttccggggggagggagaggaagtgcctctacaagggcctagagtcgtcctgtggcactgagggctctggcagctgcacacaggttgataatgtcactggtgggtgaggctctgtggtcagcaggtgcccggcccaaggtctcgcccctcgtggcaggaggaagctttggaagggttttggagactgggattctaaggggccgtctggagacagggggactaaactttgggtcctgctgatcgggtgccatctccactcagcccaccgtgaggcagctgctcccaggtcctggctgggcacccacccagacgtggcactgccagggcaggggtgttgctccccacatgccccatccaggtttctgtggttatcccctgcttgttatttttgcccttttgctgtgttaaatgacccagctccgagtgcttgctcaagtcatggttttgccctttagattatttccttgaagtgcgttcccagcagaacagttactgggtcaggagcaatggagaggctgtgtggttcccgggacttgtctgcagagactgcttcctggaaacactgatttagcttctgcggcatctggcatttggcgggcaggcggtgtggggtgggggggggcggtgcctgccctgctgccctccccacactggcctccttttactgagtctagcaggtgccctgctgaccttctcaagctagttggtagcaaaaatctaacccacaagttcagcttttcccaaactggtcatctgccgtctcaccttcacagctgtgcctcatcagaggacctcctctattctctttcaatatttttcttttcctttttcttttcttttttttttttttttttttttgagacagaattttactctagtcacccagcctggagtgcagtggcgcaatctcggctcactgcagcctccgtctcccgggttcaaacgattctcctgcctcagcctcccgagtagctgggattacaagcacccaccacacccggctaatttttgtattttagtagatacggggtttcaccatgttggccagctgatcttgaactcctgacctcaggtgatccacctgtctcggcctcccaaagtgctgggattacaggcatgagccaccgtgcctggcctctgcatttttttttttttttttggtggccacatcacgcactggctcccttgacttcagcggccaaggccagcagatcccccgggtgatgccccgtgtgccatttgttttccttcgtgaatgttctttccttcccccaggaatgacactgttgatttgtacctaattatagagcctcacatttatcctcctaacattttctcctttagccatgggccattttcatagcctgccactaattgccgtgggaccccagatttcttttctgatggactcggtactccatggttgcagctgtgtccccaagggccactgaggtcctctcagagcccttcccctaccctagaggccctggccaatcagggctcacctggccctggaggacatgggtcgtgggggaaacgggccgcagctgccccaggccctgtcctctgggtcttgtccacccctcccctgcccaaggacaaggtggcccctgtccccagggaaggggcctgcctggtgcttccctttctgtgctgaggctcctgaggcagctcccagccctcaagcctgggcagacctcacagtgggcctgctgttccagttgctgtttggggacccaaacataccatcttccccatttagaatgggggtccctccagtgccctggctctgtacacctccccatagaagagctgagacaagagtggcccccagtgccggtccctggggcctaggatgcttaggaccagcttccaggggagggatgggggcactgcttggctccgccaggctctgccggaatgggggcaccattcccctgaagagtctctcagtctgcctgagcattagggtctgggcccccagggccaccacactgtcatggggcaggccagggcacctaggacttctcagaggtgccagttctttgtttttgccaaccgggcttgcctgctctgtcagccaagtggcgtgtctggggtaggggggtcgcttcccagccagtgaagccaccaacttctgtggaaatgctcggagctgtgtcctcaagggctctttatttccccaagacaacagattgcttgtgtcctagacaatgaagttttcatccccagcctgcatcctggaccagcccgccactgccccgctggccacctctctgcatcgggcacccagtgccagggactggttgggcagctcagcctctttgccattcacctgttttgtcacccagactggagtgcagtggcttagtgtcagctcactgcaacctccgcctcctgggttcaaatgattctcctgcctcagcctcctgagtagctgggattacaggtgcctaccaccatgcccacctattttttgtatttttagtagagacggggtttcgccatgttgacaggctggtctcgaactcctgagctcaagtgatccacccgccttggcctcccaaagtgctgggattacaggcgtgagccactgcacctggcctgtcattgatctgttcagtggccatttggcctttgctctgacttggtcactctgggttgagtgtccccagctgttcagggagaatgataatatttacatctgtccctggggcagccctgagaatgtggacagctgaggcctgcaaagcactggggacccagcctggccaaagtgcttgagggcaaaactgatggggctgggtgccatggctcacgcctggaatcctagtactttggaaggccgaggtgggtgaatcacttgaagtcaggagtttgagacagcctggccaacatggcaaaaccccacctctactaaaaatacaaaaattatctgggcgtcgtggtgcacgcctataatcccggctactcgggaggctgaggcaggaggatctcttgaactcaggaggcggagagtacagtgagctgagattgtgtcagtgcactccagcctgggcgagggagattccatctcaatacaaacaaacaaaaacaaacaaactgatggggctgaggagccactaaggctgtacagctggggcaaggctggaatggtgtgaaggtgtcgggaatgcctgggcagggcccgagtttcctgtcttatttcctgaggacgtgagaactgagcagacctccctggccttggccaggctcccgtagctgccgtggaaaggaggttaaggttggtggtgtagatgggggccctcacagtgagtccatcttggcccccagtggcctgggagccgattctcatccctactggcttggttgggaggtgctgggccacacgcctacattcactccacctctttccatctttcttttttttttttttttttttgagatggagtctcgctgtgtcgcccagcttggagtgcagtggcacgatcccggctcactgcaacctccgcctcccaggttcaaatgattctcttgcctcagcctccaccaccacacccggctaatttttgtatttttcatagagacggggtttcaccatgttagtcaggttggtctcaaactcctgacctcaaatgatccgcctgcctcggcctccccaagtgctgggattacaggattacaggcatgagccactgtacccggccatctttctgtctttctctgaagtccacttggtagccctgtgcggggcacccatggtgacgtgagagaatgccagccccgttgtcttaggtctttcacgccaggccaagcagtggtctttggggagaggagaggtctgagccgaggggtcttgaaggatgagtaggagtttgctggccgccccagggggacaggctgccctatgcggtgggagctggggtgcccagagcctcaatgcccaccccataaggcagaaccacgactcccgagccacgtgctggggtttggggtaggacagtgagtgtggcagtgagttgcgaaggaagaacttggactgtggatgcagaagacctgggttcaaatcctgcctggctcacttcccaggcggtggctccagacaagtcacttggggagcaccgttgggaggtgagggcgagcccacaaacatgcatagcttcagggtcctgctctgccccgcaccccgttccccatccaagcctcagtttcctcatctgtaaaaatgggctacaggaggcttctgcgaagtaacgcacatcaagagctttgttagcacaagctcatcgaatattctccttgttcttgttattcttggcttccaagcagccaaccagagcgggtaccaggtggggttgtaggggctgcctgatcctgccctcctcacctgtggcccaagggtggtgacctggcatcctctaggtatggggcaggcggcatgcgtgggaggctctgccagcctttttggcattttgtttgttcacttgacagacattttcttgggtgtttattgtgtgccaagcactgtgccaggacctgattcctgcccttggggcagactggcaaaagataaatgccacctgacaggtgagagagtggcaagagtgacggaggaagaactgggtccgggagcagggtaattcggagagtagagttttagtagcatagcagggagggccttcttggccaagtggcatttaaggggccacacgaaggggatgagggagggagccaggtgtgtgcctggagaagagcgtttctggcagcaggagcaacccgtgcaaaggccctgaggcaggatcgcacctggcgtgttgggggaacagcatggaggcctgtgtggctggagcagagtgagccggggggggggcgggagggaggaggggagggccctgtgggcagcggggaggactgtggcttttcccctgcggaaggtgggggccacggagggttgtctgcagaggagggagggaggtgccctggctcggcactcacgggcgctctctggtggctgctgcaggaggacagcgttttggttggtgatgagcgtgaacacagggaccgcacagacaataccttccagggtctgagagtctggaatggaatcgcccagggagacatggtggggtgcacccctcgtcctcccttctcttggatctgtttcggatgtgctgaaggattgattctgagatgcgagagaaaggaaggagtcgagaatgactccaggtttctggcatgagtgcctggtaggaccaagccaaagttaaccaagataaggagggtaggtgagcggtgggtgagcaggcttagggagtgatcgggagcttggctctgctcttctgggtatgaggggcctggggcccctgaggagacatgaaggagacaatgggcacgccagtctgggcttctagggagagaggtaatataggagttaccagcccatggctggtatttacagccatgagcctggatggggtcacctggggactgggtgtggacagagatgcctgtcctgaggctccctgaggttcgaaggtagagtgggagactgagtgggagtgactgtgaggagaggagtcggggtgtggagcccctgcaggcagggaaggagggagagctggctgggtgcctgctgcacaggcccgggggagtgggggtagctgaggctgacactgactgtgggggcgaaagcgtgcttggtttgagttctaggactgggggacaggaggtggagtgagtgagtgtagatgataccttccagtgcccgaggcaggaagttgggtcaggagagaatgttttctagagggaaaattccaaacgtgtaggtacagccccacagtgtggccaggggaagggcagaggagggctgcctggtgggctccagggcctgctccctcaatgtagcaggggtcccgagtggggccagcggacctctgggtcagccagggctcagcctggctgccagcacctccccgagctcaggaggaacagccatacccatctcttcccagacaaggaagcctcatcctcagtggatgccccctaactccctgggaccagggatgaccaagccactgagccaacccaccctcaggtgccggggcccaaggcccacacttgggggtccacggggcttctggctggggcgtctggttggctgtattcaagtgcacacacacacactgatcttccccacatggtatgttctgggtctggggacagctcacccagaccccaccccagagcctggggcggctgggcccatagggacagtgcttccatggctgggacaggaaacagtttacaaggcagctcacccctggcctgaccagcaggcacctgctctgctcagggaaagtgttcctgatgctccttggccagcatgagacaggcctgctgcacaccccgtgtcgactgggctcaggcccccgtccctgggtgctgttgcccacaaaccctcatctctgttctgtccacgctgcgctgactcctttctgggccagggtttgcatcttggcaagctgctctgctgtgcacccccctcctgggacaatgcatacctgtgttggagccttgtgaggagctgtgcacacacgtggactgccacacggactgccccttgaatgaggacttagccttggctggagctccctgcagctcagcaggggacctgaccctggggacaggggtggtgggaggtggctgcaggctctttcctccgggctgcgtcctcagggcacattcctgtttcccactcagccatctgtgccgaagctggatgtgggtttgctgcaccaggagaggtgggggttgaggtgggagtagctcctcatgtcctgtcacttacatacctggagcagtgacccttcccatgccctgaccagaaaccacaacaaccgtgacagctgcctactcgtgtcccttcctgtgcgatgcctgctcttttcgtggggggagacagaatctctgttgcctaggctggagtgcagtgattcgatctcggctcactgcagcctccacctcctgggctcaagcgattctcctgcctcagcctcctgagtagctggggctacagtagccaccacgcccagctaattattattattattatttttttttttgagatggagtctcgctctgtcacccaggctggagtacggtggcgtgatctcggctcactgcaagctccgcctcccggattcacgccattctcctgcctcagcctcccaagtagctggggctacaggcgcccgctaccacacccagctaattttattgtatttttagtggagatggggtttcaccacgttagccaggatggtctcgatctcctgacctcgtgatccacccgcctcggcctcccaaagtgctgggattacaggtgtgagccaccgcgcccgggtactttttgtattttttatagagacgggatttcaccatgttggccaggctggtctcgaactcccgacctcaagtgatccgcctggctcatcctctcaaagcattgagattacaggcgggagccaccgtgcctggccatgcctgctcttacttcctcctcctgtgactgccttcctgttcacacatttggaaaaagtagtccagaggtgaagtgacttgcccaaggtcaccccgctcaggagccttctcaagccgtgtctggctgcccagccaccaggctgcaggtggaggctcagggttgatggatctcaagctgctctgcctgcctggctgcctgggtccccttgccccagctgggacagccctgctctgaggaccagacacaggcaggtgttgtgctatccgcagtggctgtttctggaaggcaggagcctgccttcacttctgcaccacttagcacagtgcctgcaggccctgggctccaggcatctctcgactcctccacaccgttggcagccgcgttggtgcagcacccagggaaccggcgggaaggttgtgggggcagtcgtgggtggagtgtggggattcacagaacctcgccttcccgcccagtggtgctcatcggggactcaggcgtgggcaagagcaacctgctgtcgcgcttcacccgcaacgagttcaacctggagagcaagagcaccatcggcgtggagttcgccacccgcagcatccaggtggacggcaagaccatcaaggcgcagatctgggacaccgctggccaggagcgctaccgcgccatcacctccgcgtgcgtgtcggcagcctgggcagggacgctgagattcgggggcgtgggcttgcagcgcgtgggcttggaaggatgtgtaggagttgggcaggagaaggggagagtgtgctcccaagaccagggagtgaggctggaagaacgctttagccatgcgccgtgggaccctcaggctgaccagcgcccagccttcgccacaccagggtatctctgggtaccaagtgcagtgaggacctagctcaggccactccgccttgccgctgcccctgcccagccagcatcccagccttcctcctccctcagcttccctcctcactggtgcccacacctggtcccacacgcctcctgtcctcccacctgggcctggcctccattccctgcaaaggcttcccagccatcaggacccactcagctgcctttttctggacccctcccaagccccccagccattcccaccaccgtcttgagatcctctgggctccctcccatctccttcatccctcaggtacatctgtctctctgtcacctcctcttgtttttttttttttgagatggagtttcactcttgtcgcccaggctggagtgcgatggcacgatctcggctcactgcaacctccgcctcctgggttcaagcgattctcctgcctcagcctcccaagtagctgggattataggcacatgccgccataccaggctaattttgtatttttagtagagatggggtttctccacattggtcaggctggtctcaaactcccgccctcaggtgatccaccctctcggcttcccaaagtgctgagattacaggtggcgtgagccaccgtgcctggctgtcgcctcctcttttttggagacagacagggtcttgctctgtcgcccaggctggagtgcagtgccacaattgcagctcactgcccccttgacctcccaggctcaagcgattctcctgcctcagcctcctgagtagctggggctacaggcctgtgccaccatgcctggctaatttaattaattaatttatttattttttagttttagtttttgagacagagtctcactctgtcgcccaggctggagtgcagtggcgcagtctcagctcactgcaagctctgcctcccaggttcacgccattctcctgcctcagcctcctgagcagctgggactacaggcgcccaccaccacgcctggctaattttttgtatttttagtagagatggggtttcaccgcattagccaggatggtctcgatctcctgacctcatgatctgcccgcctcggcctcccaaagtgctgggattacaggcgtgagcgaccctgcctggcctatttatttatttttttgagatagagtctcactctgtcatccagactgaagtgcagtgtcacaatctcggctcactgcaacctccgccccccgccccccagggttcaagcaattctcctgccttagcctcccgagtagctgggattacaggcgcctgccaccacgcctggctaatttttgtatttttagtagagatggggtttcaccatcttggccaggctgatcttgaattcctgacctcgtgatccacctgcctcggcttcccaaagtgctgggattacaggcatgagccacgacccccggccaatttttgtgtttttctagtagagatggggtatcgccatgttgcccaggctggtctgaaactcccagcctcaagtgatccacccgcctcagcctcccaaagtgctgggattacaggcatgagccaccatgcccagccccttcttccctttttttgatgacctcacggtatcttctatttccagctcccaaactccctcctcagacccccacatttcagagctggatccagggagcagcgctggggcctccagacacacacccttcccttgaggccacaatgactgccccttggctcggccctggacgacccaccctgggcgtgatgtgtgctgttatcccgtgaggctgccgctgcccatggttgtcctccagagaggctcatgggcccctgaccctgcaggtactaccgtggtgcagtgggcgccctgctggtgtacgacatcgccaagcacctgacctatgagaacgtggagcgctggctgaaggagctgcgggaccacgcagacagcaacatcgtcatcatgctggtgggcaacaagagtgacctgcgccacctgcgggctgtgcccactgacgaggcccgcgccttcgcaggtgagcagacggagacgcaggcatcagagaggtgtctggaaggcaggaggcccctcacagtgttggggccctggccacagccctggcttcccttccctgaggagtggccttgggatgggccaggtgggtgggcggggtccctgagagcatgtgggagcctgtcaccctgcctccccactcacctaggcagtattctttgttccagaaaagaacaacttgtccttcatcgagacctcagccttggattccactaacgtagaggaagcattcaagaacatcctcacaggtggccggggaccagatgggtgtgggtagggcaccagccaggcagggtggaacacggcctctgaaccttcgcttgttttgttcgtttgcttgtttttttcttttttttgtcggggcaggatggatttttgctctttgcccaggctggagtgtggtggctcgatctcagcttactgcaacctccgccttccaggttcaggcaattctcctgcctcagcctcccgagtagctgggattacaggtgcctgccaccacacccgctaatttttgtaatttttagtagagacaggatttcacaatgttgtccaggttgatctcgaactcctgggctcaagtgatcctcctgcctcagcctcccaaagtgctgggattacaggcgtgagccactgcacctggcctgtttgatttttttccaccaccacccctaacctttgctttttaaacctgccggtccacctggacacttcacagggtcagaccaggtctagcccttgctggcactggggacacagagaccccctggccccagttcctggggatgggccctgccttaactcttggcgctgcggggaggcgggtagcctcagggacctggagccttttggcttctgggagtttacctctgagggaggagggcgcttctgatcttagggagcgagaggccggggctggctgtgaccagatgtgggtcctggctgggtgcgcagcccctgtccttgttacccctgatgtgatgggggcgctgtgggggtctggagagggcctctggagtcctgcagggaggggttcccctcggcaggcagggcacgtgctggctcaccccacgtccccctgtaccccctttgcagagatctaccgcatcgtgtcacagaaacagatcgcagaccgcgctgcccacgacgagtccccggggaacaacgtggtggacatcagcgtgccgcccaccacggacggacagaagcccaacaagctgcagtgctgccagaacctgtgacccctgcgcctccacccagcgtgcgtgcacgtcctccgcccgcccccgccacggtatcctctggcccctccctgctgtccctctgtggccggctcgttccagccctcccagtgagctctgcacggccgggccggggcccaggaaggacaggagccagtgctaccccgtcctgcccggggaaaagctagaagccccggtttgctgcacccatgaaactcgggtccccacagcgtcttggcggggtggggagggcggcaggatggacggggctggccagaggcgaggaggacgggcggacggcgccgccttctccccttttccttggccgactctagggagcgattgcctccctccctccgtgaccgggtggcccagccagcccgtcgtccccacccagaaccgtgctctgggccaaagcccgaagaaccaggcagcgggggccggggcaggcggaccccccgggctctcagcgcccacccgctcctccgcacacagcagctcgcacaggcctcccacctctgcctgttgattgatgcagggagaagcccgtccccccctctcccctctcccctcccctctcctgcacgcaacgcgccctctcggccctccctgtccccctcctctgtctcgtctccccatctggtctggaacctgtttgcaagtgaagcaatatctccgtgttttgtatatacaaccgctcttgtagcctttggtttttgttaatgtagagaaacacagattctttatacactttgtaagatttacgccaaaccccagctctcgatctcttcttctccctgtggcccctgcgctgttgccccgtccccgtcaccccgcccgttactgaaatgtataatctgacttcctgtacagaaacctgccgctgcgcctctgtcttctttcttttccgccaggcgccagctcctaggctgaggcccctctcgctgcacgttccccaatgcaggccagaccccccgtctccccagcccaccccacaggaagcgagaggaccccagcacctgccaagggcagcgtggaagtcagccagcgcagttggggtgggccctggtcaagctgcccctgtggcagggagggatggaaggctgccgcttgtccttgactttaaactcctgggtcctaggacctcaggcctgcgggcgtcccctgatggggatgggagccaagagcagtggccagggttcatcactttgtctcctgccagggcctcccctcccctggggtcctgacgagggtgacttgcccagtggatgttggtgatgccagatgtctccaccctaaactgacaccggaggagggcccagtggggaaatgccagggacagcaaaatgtgtggcatggagttcctcttcccaggatccagcgtctccctccacctcacccctgcagtgaccttgggaccagtgtgagctgccagcagctgtccaaaagctccagcctctagctgaagaggccacccacaccctgaagaccctggggacccatgagagaggacagcaccactccctcttgattctagactggctgccctgcctggagggataggggatcacagacaccttttcccagaagagctccaggtcgctgggagctgtgtagacacaggagttggaatgagccaaggtgtgcgctccaggcccagggagcagcctggcacagagctaactggcagaattggaggcacctgggcaccctgggctccaaggcccattcacagagacccctgggacatggattcccctgggtttgggcagggcaggtcatgtggtggacagaggcattgggtgctaagcaagaaagcaccttgagcttttgtttgtttgtttgtttgttttgagacagagccttgctctgtcacccaggctggagtgcagtagtgtgatcttggctcactgcaacctccacctcccaggttcaagggattctcctgcctcagcctctggagtagctgggattacaggcacatgcgaccacacccagcttatttttgtatttttagtagagacagagttttgccatgttgcccaggctggtctcgaactcctgacctcagatgatctacccgcctcgacctcccaaagtgctgggattacaggcgtgagccaccgtgattggccttagcaccttgaatttcaagcagtcaaaagatcaacaaatatttctagagccgccattatctgctaggcctgagatggggactgactgacatactctatgtccctttaagagtcagaagccagcaatgccagtttaattactctgatttcagtgatttaataagcacgtcctgctcactctgccagactctgttcttaaatcttttattattatggtaacatacacataacataaaacttaactttttttggccaggcgcggtggctcacgcctgtaatcccagcactttgggaggccaaggtgggtggatcacgaggtcaggagattgagaccatcctgactaacatggtgaaaccccgtctctactaaaaatacaaaaaaaaattagccaggcatggtagcgggcgcctgtagttccagctactcgggaggctgaggcgggagaatggcgtgaacccgggaggcggagcttgcagtgagcagagattgtgccactgcactccagcctgggcgacatagcgagactccgtctcaaaaaaaaaacttttttttttttttttaagtcagggtctcgctctgtcgcccaggctggagtgcagtggcatgatctcactacaacctccaactcccaggctcaagccatcctcccaccgcagcctcccaagtagctggaaccacaggcacacgccacaacgcctggctaatttttgtattttttgtagaggcaggggtctcactgtgttgcccaggctggtctcgaactcctgggcccaagaaatccacccacctcagcctgtcaagatgttgggattacaggcttgagccaccatgcctggcccatatggcaattctacgtttacttttcttagggaccgtgttaaatctttcacacatcattatttgttatttgcaacaacccaacgaggtgggcataatatactggccccttttacagaagttaagtgattcccctaaggtctcacaattagtaagatgcagacaggtttcaaacccagaactgtgtgtaaccgctaagttatgaggcttctctgagcatttattgagtaccagctatgagccagaaaactctaagaagtggataaaatgcccagataaaaggctgggaagacagccgggcacagtggtgtgacctgtagtcccagctactctgggtctgagacaggagaatttcttttttcttttcttttttttgagatggagtctcgctctgtcgcccaggctggagtgcagtggcttgatctcggctcactgcaacctccccctcgcctcctgagtttaagcaattctcctgcttcagcctcctaagtagttgggattacaggcacatgccaccacacccggctgatttttttttgttttttttttttttggtagagatggggtttcaccgtgttagccaggatggtttctatctcctgactttgtgatccgcccaccttgggctcccaaagtcctgggattacaggcgtgagccaccgcgccagggcaacaggaggatttcaagtagaaactgccaatgaaaaaagagagagagagaaggatcacttgaacccaggagttacagtccaacctgggcaacacagcaagacccagtctctaaaaaaataataaagaaacgctgagagcatggctcacgtctgtaattacagcacttcaggagaccaaggcaggcagattgcatgagcccaggaatgcgagaccagcctgggcaacatgatgaaaccacgtttctacaaaaaatacaaaaattagccaggcatggtggcacgcacctacttaggaggaggagatgggaagatcaattgagtcagggaggtagagaatgcagtgagctgtgatcacaccactgcactccagcatgggcaacagagggagacactgtcacagtgaatgaatgaatgaatgaatgaatggagactgggaagaagtataccaactttttaaaaatgttttatggggtgggtgcagtggctcatgcctgtaaccccagcactttgggatgccgacgcaggcagatcatttgaggtcaggagttcgagaccagcctggccaacatggcaaaaccccatctctaataaaaatacaaaaattagctgggcatggtggcaggtgcctgtaatcccagctactccaggggctggagcaggaggatcacttgaacctgggaggtggaggttggagtgagcagagatagtaccactgcactccagcatgggcaactgagtgagaccctgtctcaaaaaaaaaaaaaaaaaaaaaccacctaaaggtttgattagagtcaggactggattgagcgctgcctaactagtgtcgtgtacatacattagaagacacattacattaatgtttccctcttttgtggcattagcagctgctaatgagcattaccaagcttcataatccattagcggctacaaaatggtgatatgcaaattgtattccttctcttatttctggaatactttttttttccttttttttgagatggagtctcactctgtcgccaggctggagtgcagtggtgagatctcggctcactgcaacctctgcctcccaggttcaagcgattctcctgcctcagcttccccagtagctaggactacaggttcacaccaccatgccaggctaaatttttgtatttttagtagagacggggtttcaccatgttggccaggatgatctccatctcttgacctcgtgatccgcccgcctcggcctcccaaaatgctgagattacaggcgtgagccactgcaccgcccagccaggttacttttttttcctttgagacgggtcttttttttttttttttgagtcagtctcattctgtctcggctcactgcaacctccacctcctgggtttaagtgatcctcatgcctcagcctcccaggtagctgggattacaggcatatgcccagctaatttttgtgtttttagtagagatgggatttcaccacattggccaggctggtctcgaactactggcctcatgtgataaacctgctttggcctcccaaagtgctaggattacaggtgtaagacaccgtgcccagccttcttttttttgttttcttttttgtgtatttatttatttatttatttatttgagacagaatggctctgtcacccaggctggagtgcagtggcacaatctcggctcactgcaacctctgcctcccaggttcaagcaattctcctgtctcagcctcctgagtagctgggactacaggtacacaccaccatgcccggctaatttttgtatatttattatagatggggtttcaccatattggttaggctggtcttgaactcctgacctcaagtaatccacccacctcagcctcccaaagtgctaggatcaggaatttgacaccatcctggccaacatgatgaaaccccgtctctactaaaaatgcaaattctagatgggcatggtggcaagtgactgtaatccagctactcaggaggctgaagcaggagaattgcttgaacctgggggcagaagttgcagtgagccaagatcgttccattgcactccagcctgggcgatagagtgaaactccatctcaaaaataaataaataaataaataaataataaataaataaatgaaattatctgccaggcacagtggctcacgcctgtaatcctaccactttgtgaggccgaggcaggaagatcctttgagcccaggagctcaaaactagcttgggcctcatagcaagccccgtctctattatttaaaaattaaggccaggcacagtggctcacgtctttaatcccagcactttgggaggcctaggcaggtggatcacgaggtcaggagtttgagaccagcctggccaatacggtgaaactccgtctctactaaaaatacaaaaaaactagctgggcatggtggcgtgcacctgtattcccagctacttaggaggcggaggcaggagaatcgcttgaacccaggagacagaggttgcagtaagccaagattgcaccactgcactctagcctgggcaatagagggagactccatctcaaaataaaataaaataaaaaattggctgcgcgcggtggctcaggcctataatcccagcacgttgggaggccgaggcgggcagatcacgaggtcaggagatcgagaccatcctggctaacatggtgaaaccccgtctctactaaaaaatacaaaaaaatcagccgggtggggcggcgggcgcctgtagtcccagctactcgggaggctgaggcaggagaatagcgtgaacccggcaggcggaggttgcagtgagccgagatcacgccactgcactccagctgggcgacagagcgagactccgtctctaaataaataaataaataaataaataaataaataaataaataaaatatcattcgccactaaaatgaaccagggctcttcggaaaaatggttgagtccaggcctggggcaggcaaaagacaagacaagtcagcctggaagagtttgttgagccagttagtaaggaaatgccccaagatggaattagaaaatcaccatttggggccgggcgcggcggctcacgcctgttatcccagcactttgggaggccaaggagggcggatcaccaggtcaggagatcgagaccatcctggctaacacggtgaaatcccatctctactaaaaaaaaatacaaaaaattagccgggcgtggtggcgggcgcctgtagtcccagctactcggggggctgaggcaggagaatggcgtgaaccccggaggcggagcttacagtgagccgagatcgcgccactgccctccagcctgggcgacagagcaacgctccatctcaaaaaagaaaatcaccatttggttgctattatggtaataactgactcaggcaagggtcatcaattgatattaagctcttggaaacggcgtgtgttgaggaacaggctatttaattactttcgaagtatctccccagaaagcacttattaacaaagtgtaaagtcaggtgccgtggctcatgcctgaggttaggaatttaagactagcctggccaacatggcgaaaccccatctctactaaaaatacacaaattagctggacgtggtggtgcgggcctgtaatcacaactactcaggaggctgaggcaggaaaatcacttgaaccggtggcggaggttgcagtgagcagagagggcgccactgcactccagtctgggccacagaatgagactccatcgccaaaaaagaaaaaaaaaattggtcgggcgtggtggctcctgcctgtaatcccagcactttgggaggcggaagtgggcagatcacttgaagtcaggcgtttaagaccagcctgaccaacatagtgaaacctgcctctactaaaaacacaaaaattagctgggcgtggtggtgcgggcctgtaatcccagctactcgggaggtgagccaggagaatcccttgaacctgggaggcagaggttgcagtgagctgagaccacaccattgcactccagcctgggtgacagagtgagactctgtctcaaaaaaaaaaaaaaaaaattaaaattaaataaaatattaaaaacaacaacaacaacaaaacaccacagtgtaacatactaacctcacactggagaaactggcagacaccatttgaaccaagttagcacaatcgatagtggacaaaatcagcattgtatgcatcctgaaaacacaacgtcacatctgtttcctgccacaaatgcaaaatcatgagaaagtattagacaaatagcaatggaaggacttcctgcaaaattactagcctggaatttttgaaaaatattgatgtcatggagagaaggtaagattgataaaatgttccagaaagagagactaaattagagtcgttaacaacaaaatacaatgcttgatcctgggatggatttgggattttttgttttttgacacaggatcttgctctgttgcccaggctggaatgcagtggtgaggtaatggctcactgcagcccagaactcctgggctcaattgatcctctcacttcagcctcccaagtagctgggaccacaggaggatgccaccacaactggctaatatttttattttattttgtagagatggggtctcactgtgctgcccagactgatctcagactcctagacccaagagaccttcctgccttgggctcccaaagagctgggattgcagacatgactcactgtgcctggcctggactttggatttttaaaggactttattggaaacttttcttttcttttttttgagacagagtctggctgtgttgcccaggttagagtgcagtggcaagatctccgctcactgcaacctccaccttgcagattcaagcaattctcctgcctcagcctcctgagtagctggaattacaggtgcccacaacaaaacccagctaattatttgtatttttagtacagacagggtttcaccatgttggccgggctggtctcgaactcctgacctcaaatgatccaagtgctgggattacaggcatgagtcactgcacctggcctttgaatgggctctgggaattacatgataatattagatgaacattaattttctgattttgaaggttatactgtgattatgtgcaaaagtgtgcttatactaagtgaacatatagtgcagtatttttttaaaaattgatctgtcttagagatgggggtgggtgagtttactatgttgcccagactggcctcgaactcctgggctcaagtgatcctcttgcctcagcctccagagcagctgggactacaggcctgggccaccacacttggctaacttttattttattttattttattatttatttatttatgtatttatttgagacagagtctcactctgtcacccaggctggagtgcagtggcgcgatgtcggctcactgcaagctctgcctcccgggttcacgccattcctctgcctcagcctcccgagtagctgggactacaggcgcccgccaccacgcccggctaatttttttgtatttttagtagagacggggtttcaccgtgttagccaggatggtctcgatctcctgacctcgtgatccgcccgcctcggcttcccaaagtgctaggattacaggcgtgagccaccgcgcccatccttttaaattttttgtagagacgggaactcaccatgttgcccaggctggtccccaacatctggcctcaagcgatccttccgtctcggcctcccaaagtgctccgattacaggcatgagccactgcacccggccagtctcaaaaaaaaaaaagttaaattctgcagaggttttatttattagaggacgctggccgtctgcaggtggcgcagcagcaccccctcgtgcctggggcggggctggggcggggccagtgctggggcggagccggagctgggggcggagccaagacgcggcaggggcggagccagcagctgcggcacagcggggcctgtgcggcccaagtcgtccctgtggcctccggccccgcctcttagggcgggacgtgcaaggcgattggcgaatgcaggcgagaggcggtcgctattggtccgcggcgctgtcggctcggcgggcggtgcccggacgcaggtgccggccggagcggagctagtggcgccgacgggccgggccgggccgggaccggggccgaggcgaaccgaggggcctgtgcggccgcccggcccggccgcggatcaggtaggcacgggcctgcaggtagggccggaggacgccagtccgcgggccggccccgggttcgaggccggagctcggcacccgggcgggacggctgggctcgatcccttggccacagccttctcggggacgcggggacctcagttcccgtgtcaaggccggtgggaggtctccggggtccggcacacataggcgcctctccgagcctcggtttccccacctgtgaaactgggtcatcccattgccaacctgatggggcttctgggaggattcaggaggtggctggtgcagaaaacgcctgacacacagtaggcaactgctaagtggccaatgcccttccccaacctccttctcagagcggctctgcctgcaaaatagtaagttataatataatgacccagccactttgcacaaagatgctgaaacaggatgccctgtgctatgtgggtgctcaaaacggggtagtcaaatgggcatgttgagctcattcagttcttttgaaaccatactgagtaggtggaagcagtagaaatgtcccctgttatacagttgagagagtccaggctcaaagaggttaagtgtcttgcccagggccacacagcacataaggagtagagctgggattggaaccttgcttctcatgcagggaggaatgaatgcaataacaacctccacatttaccctaaaaaatattaatagagcttttattgagcacttactgtgtgtgccagggttgactgtgtgacctctcatcaacaactctgtaagctgatgatagtaattataataagagctaatagttattaacttcttaattttttactaatttatgaactacatatcattatgactccccgtcttttttttttttagacagagtctctctctcttgcccaggctggaatgcagtggcacgatctgagctcattgcaacctctgcctcccagattcaagcgattcctacctcaccctggtcaagtagttgggattacaggcccccgccaccgtgcctggccaatttttgtctttttagcagaaacggggtttcaccatgttgaccaggctggtctcgaactcctggcctcaagtgatccaccttccttgaactcccaaagtgcacaaagtgctgggattacaggcgtgagccactgcgcccggcctgtaacactcattttagagatgataatactgaggctgagagagtaaaacagctgcctgagaccacaatgtagggagttttagggccctctgattcctctgccctctgtttcctaccttcaggaaaaggagcctgggcaggtatggaaaagactggggggcctcagtgccaccctaaacaagcctagctaagggtgagctttactggatgaattcagcctggaggctccttctcaggagacccctccacggacagagtccaccagctccatcattagaatgaggcccagagaagcaaagtgacttgaaccaggacacccagcatcggtggcatagccaggagggccaggagttaaagaacccaggtctcttgaggtccagaaccactccctggactgttttaagttcaaattctgacaccaccccttcctagctatatgaccttgggaaagtaggtgcctctctccgagcttcagcctctttccccatcatagggtgtaattattggtttgttgtgaagactcaatgagatctatctccaggccgggcgtggtggctcatgcctgtaatcccaacactttgagaggccaaggcgggcagatcactaggccaggagttcaggaccagcctgggcaacttggcaaaacaccatttctacaaaaaaatacaaaaattagctggatgtggtggtgtgcagagctactcaggaggctgaggtgggaggatcacctgaacctgggggcggtggaagcttcagtgagctgtgattactacactgccctccagccttttgggtgacagattgagaccctgcctcaaaagaaaaaaaaaaaaaaacagacaaaagaaagaaaagaaataggccaggcgcggtgactcatgcctgtaatcccagcactttgggaagccaaggcgggtggatcacctgagataaggagtttgagaccatcctggccaacatggtgaaaccccgtctctactaaaaatacaaataattagccagctgtgggtggagggcaccggtaatcccagctactctggtggttgaggcaggagaatcgcttgaacctgggaggcggaggttgcagagaaccgaggtggtgccattgctctccaccctgggcaacaagagtgaaactccatctcaaaaaaaaaaaaacaaaaaaaacaaaaaaaaaaaccagacaaaagaaagaagagaaataaatctcctgggcactgggccaagtttgctggagccatcagatcactctcccatttcagcagcctcagagctgagtccgacttgcagtcaccctctctttgtgtccagcctcaagtttggcctcttccaggcctgggcctctgtggtttgagtggacctctagcctctaaatatctctgatgcccaccacaggggctggccgaccaggatcggagggtcaagagatgtggctctctcacgctgttcttaaacggagtgaggattgagaaatgactacaacatggccaggcacagtggctcatgcctgtaatcccagcactttaggaggctgaggtgggcggatcacgaggtcaggagttcgagactggcctggccaacatggtgaaaccctgtctctactaaaaatacaaaaattagccgggtatggtggtgggtgcctgtaatcccagctactcgggaggctgacgcaggagaatcccttgaacccaggaggtggaggttgcagtgagctgagatcggccactgtactccagcctgggcgacagagcgagactctgtctcaaaaaaaaaaaaaaaaaaaaaatgactgcagcagcaaccagaaatgcagcagctctgggctagacagagggccaggtgctggggacagcgggaggcaatctgacagggtctcttttttacagaattcactgtagggtaggacaacagacgtggctaaatacgtaggtgaataagtagaatgtttcagacagggacacatgccacgagtggaatcaagtggaccccattggcacttcattgattgattgagacagggtcttgctctgtggcccaggctggagtgcagttgtgtgatcatggctcactgcagcctcaacctgggtgcaagcgattctcccacctcagcctcctgagtagctgggattacaggcgcacatcaccacacccggctcatttttgtattttttgtagagacggggtcttggtatgttgcccaggcttctctcaaactcctgggctcaagcgatcctcccacctcagcccccaaagtgttgggattacaggcatgagccaatgcgccaggccccagacagcattgtcgagaaggcttctccaggaaggtgacctttgaaggagacacttataacaactgtttcgagttcagtgagatgatgactatgtatggagattgcttggcatagtgtctggttcttaatagatagaagctgctagtataattttggtggtttgcaggccttgcattaagagatttacctgtggttttttttttttctccctgatagaagaaatattagaacaccacatgcaggagctgggatagttcctgtaatatccagttatttgcagaaatgtaaagaccaggccaggggtggtggctcaagcctgtaatcccagcactttgggaggccgaggcgggcagatcacttgagatcagcagttggagaccagcctggccaacgtggtgaaaccctgtctctactaaaaatacaaaaacgagctgggtgtggtgaaacacagctgtagtcccagctactcgacaggctgaagcaggagaattgcttgaacccaggagcctgaggttgcagtaagctgagatcacaccactgcatttcagcctgggtaacagagtgagaccctgtctttttttttgggcggggggatgaagtcttgctgtcacccaggctggagtgcagtggcgtgatctcagctcactgcaaactccatctctcaggtttaagcgattctcctgcctcagcttcccaagtagctgggattacagttgcccgccaccatgcccaagtaatttttgtgcttctagtagagatggggttttgccatgttggccaggctggtctcgaactcctgacttcaggtgatccgcccgcctcggcctcccaaagtgctgggattacaggcatgagccactacgcccggccaataccctgtctttttttttttttttttttttttttttttttgagaaagaatttcactcttgttgcccaggctggagtgcaatggtgcgatctcggctcactgcaacctctgcctcccaggttcaagtgattctcctgtctcagcctcccgagtagctgggattacaggcatgcgccaacatgcctggctaatttttttgtatttttagtagacacggggtttctccatgtggtcaggctcgtcttgaactcctgacctcaggtgatctgcccacctcggcctcccaaagtgctgggattacatgcatgagtcaccacgcccggccaagaccctgtcttaaaaaaaaagaaatgtaaagacctagcctcagaagggctgggctggaggaaaggactcgcctctgcctgccttcccgtaaagagcccagccgcttcccctttggcctctgagcttaaggttctggttgcagggacttgggagggagagcagcaggcaccctgtgtcaggcccggccactgccctgtgggtgttatctcaggcctgcagtcttcctcttgggtccctgcctttgggcaatacttgcttatctggcctgcagaggcctgactatgatgctcagaagaacatgtgaggccaggaaggctgctggctgagctgtttagagggcatttatccagcagtgaaccgtcctagcgcaagagttagtaattgctcccctgttccttcacctccccactttggagctcagatttgtttttttgtttgtttgtttgcttgctttcttttgttctgttttagagactggagactgggtcttgctctgttacccaggctggagtgcagtggtgtgatcatagctcactacagccttgaactcctgggctcaagaggttgaggctccctcctcagcctcccaagtagctgggactacaggctttcagcaccatgcctggctaattcaaaaaaaccttcagagagatagggtctctctatgttgccctagctcgtctcaaactcctggcctcaagtgatcctcctgcttggacctcccaaagcgctgggattacaggtatgaacaacttcccctggcccagggctcggattttgattggcagtttacaagctgacttggggtgggggtgggaatacttcgctgagtacttgattgcctctcttgcttggactttctgaacactttaggggctgcaggggctctggacattgtagctcttgggggttggacaagctgggaacagagatccttggctccagggcacctgtattggcttcaaggaggtctccagaaagggcccttgtttcttcaatgaaattctctgccgggccgggtgcagtggctcacacctgtaatcccagcactttgggagtccgaggcagatggatcacctgaggtcaggagtttgagaccatcctggccaacatggtgaaaccccatctctactaaaaatacaaaaattagccgggcgtggtggctcatgcctgtaatcccagcactctgggaggccaaggcaggaggatcacaaggtcaagagatcaaaactatcctggccaaaatggtgaaaccccatctctactaaaaatacaaaaattagctgggcatggtggcgcatgcctgtagtctcagctactcagcaggctgaggtaggagaatcatttgagcccgggaggcggaggttgcagtgagccaagatcgcgccattgcactccagcctgggcaacagagccggactccatctcaaaaaataaataaataaaatacaataaaaataaaaataattggccgggcgcggtggctcacacctgtaatcccagcactttgggaggccgaggcgggcggatcacgaggtcaggagatcgagaccatcctagctaacacggtgaaaccccgtctctactaaaaatagaaaaaattagccgggcgtggtggcgggcgcctgtagacccagctactcgggaggctgaggcaggagaatggcgtgaacccgggaggcagagcttgcagtgagctgagatcaggccactgcactccagcctgggcgaaagagcaagactccgtctcaaaaaaaaaataaataaataaataaataaaaataaaaaataaaaataaaaataaaaataattgccgggcgcagtggctcacacctgtaatcctagcactttgggaggctgaggcaggtggatcacaaggtcaggagatggagatcatcctggctaacatggtgaaaccccgtctgtactaaaaattcaaaaaattagccgggtgtgttggcgggcgcctgtagtcccagctactcaggaggctgaggtaggagaatggtgtgaacccaggaggtggagcttgcagtgagctgagatcgcgccactgcactccagcctgggcgacagagtgagactccgtctcaaaaaataaataaataaataaataaataaataaataaataattagctgagtgtggtggtgggcccctgtaatcccagctacttgggaggctgaggcaggagaatcgcttgaacccgtaaggtggaggttgcagtgagccgagatcatgccattgcactccagcctgggcgacaagagtgaaactccatcttaaaaaaaaaataaataaatataaataaaaatacaaaaactagccaggcatggtggtgcatgcctgtagtcccagctacttggggggctgaggcaggagaatcgcttgaacccaggaggtggaggttgcagtgagctgagatcgtgccactgcgctccagcctgggcaacacagcgaaactctgtctcaaaaaaaaaaaaaaaaaaaagaactggttctgataccttatctggaaaggtgatattagttgaaaggtggtcctggccctggaggctttgagggtaagaggaggcctagcttttcttgtcttctcttttttagagacaggttctcactctgtggcataggcaggagtgctgtgggcaccgtcatagctcactgcagcctcaaactcctgggctcaagtcatcctcccacctcagcctcacaagtggctgggactataggcttgtgctaccatgcctggctaatatttttggttttctttagtagagccagggtttcaccatgttgcccaggctggtctcaaactcctgagctgaggcaatcggaggcaggcggattgtcttgaatccaaagtgctgggattacaggtgtgagccactgctcctggcctaattttctcattttttataaagatagagtcttgatgtgttgcctaggctggtctcaaactcctggggctcaaacaatcctcctaccttggctttcaaagcaccgggactatagacatgagccaccacacctggccaggcctagctttcctgttttttttgggtttttttttttttttgagacagagtcttgctctgtcgcccaggctggagtgcagtggcgtgatctcggctcactgtaacttccccctcctgggttcaagcgattgtcccgcctcagcctcccaagtagctgggactacaggcgcgtgccaccaagcctggctaattttttgtatttttagtagagatggggtttcactgtgttagccagaatgggaaacctagcttttcttttttttttacttttttctttcttttcttttttttttttttttttgtatttttagtagagacagtgtttcaccatgttggccaggatggtcttgatctcttgacctcgtgatccacccgcctcagcctcccaaagtgctgggattacaggcgtcagccaccgcgcctggccagggaagcatagcttttcttaggagagtgagaaataatacaacccaagctcctgctgtataccagccttgtgctgagttacatgcatcgtctccttgaatcctcactggccctacagaggcccattttacagatggtgcaaactgaggctcagagatgtaaatggtctagtggtccctacagccttgacaagaggggactcaaaccttagtccgtcaggctcattaaccttgcccctaacctccgcactggcctgttcccaggctcctggaaccatgggcctcaggccctgaggatacggggctcccggtggccatgacgacgggtgactgctgccacctccccggctccctgtgtgactgctccggcagccctgccttctccaaggtcgtggaggctacgggcctcggaccgccccagtatgtggcacaggtgacttcaagggatggccggctcctctccaccgtcatccgtgccttggacacaccgaggtgagtggtgactgcgtggatatcctggcctttgttgcctcttctctctgggcgcagtgagtttctcccagcctggggttagaagtccaaccgttgacagagggccaagtgggtaaatagagaaagagacacaaacagttatcgccttgtggaaacagaggcctagctttggccgggtctgattctttaggaaaagctgaaattccagattattatgtgaaatctgaaggtcaaatgttgtcaagtaacacacttttgggaggcagtatagggggcggtcaggagtgcaggctgtgggctcagtgcctcggccctgaccctgagtggacacctctctctctcccagagtgacctgggacaaattacttcaccactgtatctctcttttttttttgaaacagagtctcattttgttgcccaggctggagtgcagtggcgcagtctcagctcactgaaacctccgcctcccaggttcaagtgattttcctgccttagccacccgagtagctgggattacaggcacccgtcaccacacctggctagtttttgtacttctagcagagacggggtttcgccatgttggccaggctggtctcaaactcctgacctcaggtgatctgcccgtctcggcctcccaaactgctgggattataagtgtgagccaccgtgcccagcctctttttaaatttttttttttttttttttttttagagagtcttgctttgtcactcaggctggagtacagtggcgtgatctcggctcactgcaacctccgcctcccggattcaagcgattctcctgcctcagcctcctgagtacctggttctacaggcacgcgccaccacacccagctaatttttgtatttttggtagagatggggtttcaccatgttggccaggctgatcttgatctcttgacctcataatccacctacctcagcctcccaaagtgctgggattacaggcgtgagccaccgcgcctggccgtgctcaacaaatattaaggctttttttttcctctcttctctgaatttgtttttttgttttgttttgttgttttggagacagagtctcactttgtcacccatgctggagtgcagtggcatgatctcagctcactgcaacctctgcctcctgggttcaagcgattctcctgcctcagcctcccaagtagctaggattacagcccccccgccccgaccatgcccgactaatttttgtatttttttagtagagacggggtttcaccatgttagtcaggctggtctcctgacctcagatgacccacccacctcggcctcccaaagtgttgggattacaggcatgaaccactgtgcctggcctcttctctgaatttgctctcccaaactttttcacagtttcccagaacaagctccaaactgacatgattcttcctcaagattctcgtcacttctgtttccctgggttggtttccggacaaagggttccttttttgttaactttgtttgtgtgtgtacttgggggagggtgggatcggggtatgggttcagaaaggaggcaggcaggcatgcccttttgccattgcaggaggaaatagcagtccagggacaggactgttgagaaagcagccatgagcagcctgttgggctctttttaaagccgcccaactccaccccgcagcatgagaatctgagaaaaggatagaaaacagtcatttccaggcaggcgtggtcgctcatgcctgtagtcccagcactttggaagtccaaggctgaaggatcgcttgagcccagaagctcaagaccagcctggtcaacatagtgagacccccctctctagaaaaagttaaaaaatattagctgtgtggcgtggtgccacctgtagtcccagctactcgggagactgaggcaggaggatcgctcgagctagggagtccgaggctgcagtgagctgtgattgcaccactgcactccagcctgggtgactcaaaaaaaaaaaaaaaaaagaaagaaaaaaaaatacagtctctctgagaggaaattggcgttgtctggaaaatagctcttctttgtgtgacctcacagtctgccttctggccagaaatgtttgggaaacagtgactcatggctgtttggcctctgggccacgccccctgcctcctgagctgccctgggaaggacccggcatccccagagactgggccagggctggagacttttccgaggcagctttctgcagatgctttttatttctatttccccctcacaagggcagaggagcaggtgagcacttctctctggatgcacaggtttctcaggtagcacgggcttcaggtgtgattagatccaggggcccgcaaagatgtccttaagaatctacctttcccaggccttgcgcagtggctcacgcctgtaatcccagcactttgggaggccgaggcgggtggatcacgaggtcaggagatcgagaccatcctggctaacacggtgaaaccccgtctctacaaaaaatacaaaaaattagccgggcgtggtggccggcgcctgtagtcctagctactctggaggctgaggcaggagaatggcatgaacctgggaggtcgagcttgcagtgagccgagatcgcgccactgcactccagcctgggtgacagagcaacactgtctcaaaaaaaagaaaaaaaaaaatctacctttccctgtctcttggctctgctctcctctgtgctggcatcattcacaggctccacacagactaggcagctgcaggagctccaggcttctgtcagccttgtggccgacagttctggagtttacggggaaacaaagaattttaggaatagattatcggtgactctgatggtatcatacaagcctgagttggttgcatgagcaggggtgcgtgctgttctattttctttttctttttttcaaatggtctcactctgttgtccaagctggagtatagtggtacaattatgggtcattggagctttgaactcctgggcacatgtgatcctcctgcctcagcctcccaagtagctgggaccacaacatgtaccaccacgccaagataagtctttaaaaaaaattttgggaccgggcgtggtggctcacgcctgtaatcccagcactttgggaggctgaggcgggcagatcacgaggtcaggagattgagaccatcctggctaacacggtgaaaccccgtctctactaaaatacagaaaaaaaaaaaattagctgggcatggtggcatgtgcctgtagtctcagctactcgggaggctgaggctactcgggaggctgaggcaggataatcgcttgaacctgggaggtggaggttgcagtgagctgatatcacaccactgcactccagcctgatgacagagcgagactccatctcaaaaaaaaaaaaagaaaattttttttttatagagatgagatctcactaggttgcccacactggccttgaactcctcggctcaagtgatcctcccgcttcagccttccaaagtgctagaattacaagcatgagctactgctcccggcctggtgttctgactggtccagtatgaggcctgaggtcatgaggagtgttgtctgctctgccctagtccttgaggatttttttttttttttgagacggagcctcactctgtcacccaggctggagtgcagtggtgtaatctcggctcactgtaacctctgccttccaggctgaagtgatactcctgcctcagcctccccagtagctgggattacaggcacctaccaccacgcccagctaatttttgtatttttagtagagacggggtttcaccatgttggccaggctggtcttgaaatcctgacctcatgatcctcctgccttggcctcccaaagtactgggattacaggaatgagccacctcacccagctggtctttgaggattaagagtcgaggattgggggccgggtgcggtggctcacgcctgtaatcccagcactttgggagcctgaggcaggcggatcacaatatcaggagatcgagaccatcctggctaacacggtgaaaccccgtctctactaaaaatacaaaaacacaattagccgggcgtggtggcaggtgcctgtagttccagctactcgggaggctgaggtgggagaatggcgtgaacccgggaggcggagcttgcagtgagccgagatcgcaccactgcactccagcctgggtgacagagcgagactctgtctcaaaaaaaaaaaaaaaaaaaaaaagagttgagggtggggaagttgtgcaggacaatcagggtgggtattttagggaaatttggagaggacatgggggcgggtataacagatgcccatcttgggtctgagagggtgctgcagggtccctgggaagggaacacatcactccacctgtgggagtctgggaaggcttcgcaaggttaccttccctgcatctccttcccaaagggaaggacatttagagctgggcattgaaggatgagtaggagttcactaagtggcagcatggggtaagggtgagcttgtgatccagtgggtagtgaagcaggtatagacagaaagcccaatcattgctcatgggtcctatctctgtgtccagtgatggtcctttctgccggatctgccatgagggagcgaacggggagtgcttgctgtccccgtgtggctgcaccggcacgctgggtgccgtgcataagagctgtctggagaagtggctttcctcatctaacaccagctactgcgagctgtgccacacggagtttgcagtggagaaacggcctcgacccctcacagaggtacccttaagagtctgagactgcggtgggcagtggggagagggcagacatgggggccaaaggcaggagctgccccgggcaatctggtggtcctcctagggcagaactccctaccgcccctgtccaccaggtgggtctgctgatggtgtgtcagaaaccaggcctagggtttaagagctcccagacccattaacctctccctgttttcattcagtctttcttcttcttctttcttcttcttccttctccttcttcttttttttgagacagagtctaactcttgtccaggctggagtgcagtggtgcgatctcggctcactgcaacttctgcctcccaggttcaagcgattcttctgcttcagcctcccaagtagctgggatgacaggcgtgcgccaccatgcccagctaattttctgtatttttagtagagatgcggtttcaccatgttggccaggctggtctcgaactcctgacctcaagtgatctgcccacctcagcctcccaaagtgctgggattacaggcatgagccaccgctcccagcctgtgtctttcattagcagagatttcctgggcacctccagcatgcccagcactctgttaggcactggggacccagccaccaacaagacacgtagggctgggcactcatggagattaaagtccagtaactttaatctggacttcaaagcatcgcttctgatatgaggttacagaaaaaaaaaaaaaaaatcaacgaagcaactggtttctgggagcaatagtgcagtaagggaaaaacatgtcacagggggtggggcaacttggggtgtcaggcaaggcctcaaaaggaggtgaaccccccagctgaggcctgagagatgaaaaggaacaagctgccgggcgcggtggctcatgcctgtaatcccagcacttcgggaggccgaggcgggcagatcacttgaggtcaggagttcgagaccagcctggccaacatggtgaaaccccgtctctactaaaaatacaaaaaatacaaaaaaaaaaaaaaaaagtccagacacggtggctcacgcctgtaatcctagcactttgggaggccaagatgcatggatcacctgaggtcaggagttaaagaccagcctggccaacatgggaaaaccctgtctctactagctatacaaaattagccaggtgtgggctgggcacggtggctcatgcctgtaatcccagcacttggggaggccgaggcgggcggatcacgaggtcaggagatcaagaccttcctggctaacatggtgaaaccccatctctactaaaaatacaaaaaattagccgggcgtggttgcaggtgcctatagtcccagctactcgggaggctgaggcaggagaatggcctgaatccaggaggcggagcttgcagtgagctgagatcaggccactgcactccagcctgggcgacagagtgagactccatctcaaaaaaaaaaattagccaggtatggtggtgggtgcctataatcccatccactagggaggctgaggcaggagactggcttgaaccctagggaggctgaggcaggagaattgcttgaaccctagggaggctgaggcaggagaattgcttgaacccgggaggcggaggttgcagtgagctgagactaagccactgcactccagcctgggtgacaaagcaaaactctgtctcaaacgatgaggaaaaagctaggtgtggtggcgcatgcctgtaatcccagctacttgggaggctgaggcaggagaatcacttaaagctgggaggcggagtttgcagtgagttgagatagcgccactgcactccagcctgggcaacagattgagactctatctcaaaaaaaaaaaaaaaaaaaaaaaaaaaaaaaaaaccaaggctggacgtggtggctcacaatcccagcactttgggaggcagaggtgggtggatcacctgagttcaggagttcgagaccagcctggccaatgtggtaaaacaccgtctctactaaaaatacaaaaattagctgggcatggtggcgggggcctgtaatcccagcttgaacccggaaggcggaggttgcagtgagccaagattgcaccacagcactccagcctgggcaacaagagcgaaactccgtctcaaaaaacaaaaaacaaaaaccctagaaaagcccctggcccacctaggagccagagtgtagggagaaaagtgggagggaggtccagccccttcacacaccctcccacacccactttggtctccgtgctacagccacacagccccctccccacacatcttgtctaggccgcctccccctatcccagggcctttgcatctgccgcccctgcagcctagagccccatctcccccattcttcacgtggttccttctgttcattccgttctcttcaatgtcacctccttggcaaggccttgccccatgtgaccgttcacccatttcatacctccactgccagcatgggagggcaggggccctttctgtctcatccaccagaatttcatgaattaagcccatttcttggctgggtgtggtagctcatgcctgtaatcccagcactttgggaagccaaggtgggaagatcacttgaggccaggagttcaagaccagcctgggcaacacagcaagaccctgtctctacaaaaaaatcaaagaaatgaaagaacttattattattattattattattattattattattattattttgagacagagtcttactctgtcacccaggctggagtgcagtggcacgatcttggcttactgcaacctccacctcctgggttcaagcaattctcctgcctcagcctcctgagtagctgggattataggtgcgtgctaccacgcccagctaattttgtatttttagtagaggcagggtttctccatgttagccaggctggtcttgacctcctggcctcaagtgatccacccactttggcctgccaaagtgctaggattacagacgtgaaccaccacaccagggctttttttttttttttttttttttagcccatttcttttggcctgtcatctggggaaggccaagcgtagtagattagtagccaaagacgcttcggccctggagcaagacttcccaggttggaaccccagctttgtggactatgtagctgtgtgagtttgctcacttgagttaattcctctgtgcctcagtttccccatctgtaaaatgggggtaaatgtgcccagcacctggcagggcctggctcctcatgggctcaataaatgtttgaaagaaggaaagggccaggcgtggtggctcacacctgtaatcccagaactttggaaggccgaggtgggcagatcacttaaggtcacaagttcgagaccagcctgacaaacatggtgaaaccccatctctactaaaaatacaaaattagcagggcatggtggcgcttgcctataatcccagctactcgggaggctgaggtgggagaatcgcttgaacctgggatgttgaggttgcagtgagccgagatcgtgccacggcactccagcctggctgacagagcgagactctgtctcaaaaaatatatatacatacaaaattagccgtgcatggtggcgcttgcctgtaatcccagctactccggtggctgagacaggagaattgcttaaacccagaaggtcgaggttgcagtgagccgagatcacaccattgcactccatcctgggcaacagagtgagaatctgtctcaaaaaaaaaaaaaagaaagaaggaaaggacagagggaggcctaggcctggaggtccttacccctccccctcagtagccccttctctgccccctctcctctgccccctatcctctcccctgcagtggctgaaggacccggggccgcggacggagaagcggacactgtgctgcgacatggtgtgtttcctgttcatcacaccgctggccgccatctcaggctggttgtgcctgcgcggggcccaggaccacctccggctccacagccagctggaggccgtgggtctcattgccctcaccatcgccctcttcaccatctatgtcctctggacgctggtgagtggctgtggttgtgcagcacgcgtctcgagctctgccgctgggagcagcagggccaaggatttggcccctggcttgtggggcacggggctccctggctgcctctgtctatggccgtgggtggaagagagcttctgaggtcaccctgcctctccaggagcttgagattccaaatgtgacaaaggtctagggaatccctgagccaggtgtgaaccttgacctgagtgcaggaacccccatccatgaacccccaagattaggagtggggcagagaggagcaaaagcctgagagagagatcgggggagaacaagatagtggggaaatatatattgattaagaaattgaggctgggcatggtggctcacgcctgtaatcccagcactttgggaggccaaggtgggtggatcacctgaggtagggagttcaagaccagcctaaccagcatgaagaaaccccatctctactaaaaatacaaattaaccaggtgtggtggcacatgcttctaatcccagctacttgggaggctgaggcaggagaattgcttgaactcgggaggcggaggttgcagtaagcctagatcatgccattgcactctagcctgtgtaaaaagagcgaaactcgatctcaaaaaaaaaaaaaaaaaaaaaaggaaaaaagaaaaaagaaagaaattgaaagggaaaacccaggcacagtggcttactcctttaatcccagcactttgggaggccaaggcaggtggatcatctgagcccaggagttcaagaccagcctggccaacatggtgaaaccttgtctctactaaaaatacaaaaatttagctgtgcgtggtggtgggtgcctgtaatcccagctactcgggaggctgaggcaggagaatcacgtgaacccgggaggcagaggttgcagagagccgatattgcgccactgcactccagcctgggcgacaagagcaaaactctgtctcaataaaaataaaaacaaaaataaattgaaagaggaaagccaggtgcggtggctcatgcctgtaatccccatactttgggaggctgaggcaggcggattccttgaggtcaggagtttgagaccagcctggccaacatggtgaaaccccatctctactaaaaatacaaaaaattaacctggtgtggtggcatgtgcctgtcatcccagctactagggaagttgaggcaggagcatcgcttaaacccagaagccagaggttgcaatgagctgagatcctgctactgtactccagcctgggcgacagagtgagattctgtctttaaaaaaagaaaaagaaagaaagaaaagaaaagaaaaattgaaggggaagagagagaggaactgagatgaaaacactgagtgaggccaggcccagtggttgtaacatctgcagtcctagcacactgggaggctgaggcaggaagattgcttgaagcaagaaggttcaagaccaggacggggcaacaaagccagatgcccatctctataaaaaatttaaaaattagtggtggtgtgcacttacactctcagctactctggaggccaaggtgggaagatctcttgaggttaggagttttagactagcagggcaacttagggagaccccatctctacaaaaggaaaataattagctgggcatgttggctcacacctgtaatcccaatattttaggaggccgaggtgggaaaatcccttgaggccaggagttcaagaccagcctgggcaacatagaaagaccccgtggctacaaaaaattttaaaaaattagctgggcatggtggcacatgcctgtagtcccagctacctgggaggctgagtcaggaggatcacttgagcccaagaatttgaggctgcagtgagctgtgatcacactactatactccaccctgggtgacaaagcaagacccagtatcaaaaaaagataaaaagcctgggtgcagtgcttctgcctgtaatcccagtattttgggaggctgcagcaggaggatcaccatagcccatgagttcaagatcagcctgggcaagatggtgagaccccatctcaaaaaataataataggggctgggcatggtgactcacgcctgtaatcccagcactttaggaggttgaggcaggcagattgcttgagcttacgagtttgagaccagcctgggcaaagtggcaaaaccccatctctagaaaaaatacaaaagtttgtcggccgtggtggtgcgtgcctgcagtctcagctactccggagggtgaggtggaggatcgcttgagcactggaggcagaggttgcagtgagccgagattgcaccactgaacttcagcctgggtgatagagcctgaccttgtctcgaagaaaataataatattaataaaagaaaaaggaaaaaaaaaaggctgggtgcagtggctcatgcctgtaatcccagcactttgggaggctgaggggggcatatcacttgaggtcaggagttcaagaccagcctgagaaacatggtgaaaccccgtttctactaaaaatacaaaaaattggccaggcacggtggctcacgcctgtaattccagcactttgggaggctgaggcgggtggatcacgaggtcaggagttcaagaccagcctgactaacatggtgaaaccgtgtctctactaaaaatacaaaattagctgtgtgtggtggcacatgcctgtaatcccagctactcaagaggctgaggcaggagaatcgattgaacctgggaggcagatgttgcagtgagctgagattgcaccattgcactccaacctgggcaacagagcaagactccgtctcaaaaaaaaaaaaaaaaaagaaaagaaaagaaaagaaaaattagccaggtgtggtggcacatgccagtaatcctagctactcgggaggctgaggcacaagaatcacttgaatttgggaggtggaagttacagtgagccaagatcgtgccactgcactccagcctgggtgcctgagtgacagaataagactctgtctcaaaaaaaaaaaaaagaaaaaaagcctgaatgagagacagacagaatgatgggggtgtgaggtattgttctaggcctctggtaggcagcagaacccttgcttagaggcaaaagctcccccaaatctcacccctcagacataaccactattgtccagctgtaggggagtccctgcctcacaaagtatttttcaatgaacctaccagcatttctttttttttttttttttttttgagacggggtcttgctctgtcacccaggctagagtgcagtggcacaatgttggctcactgccatctccgcctcctgggctcaagcgattctcctgtctcagcctcctgagtagctgggattacaggcatgtgccaccacacccagccaatttttatatttttagtagagacggggtttcgccatgttggccaggctggtctcgaactcttgacctcaggtatccacccaccttggccttccaaagtgctgagattacaggcatgaaccatcgcgccctgcccctaccagcatattttaaaatatgtaaataggatgaaatcatagctactgttttagcatctgcttgttttcattttgctggtgttctttaaaaaaaaaaacccacacacacaacgaggcagccacccagcagacattcattgtatgggtggaccatatttatttaacaaatcacttttgacaggcactgggattttttccaatgtgtgtgtggttttatttctacttccttgttttttccattatgaacagtgctttgggactgtccatgcaaatgtttcttgggaacttgcttggtcaaaggatgtgaaccactgacctttatttatttatttatttatttagccggagtctcactgtgtcgcccaggccagagtgcaatggtgcaatctcagtttactgcaacttccgcctcccgggttcaagcagtcctcatgcctcagcctcccgagtagctgggattaaggcatctgccaccatgtctggctaatttttgtatttttagtagagacgagttttcaccatgttggccaggctggtctcgaactcctggactcaggtgatctgcccaccttggccttccaaaatgctgggattataggcgtgagccattgcgctaagcaacatttattttttaatttttttttttttttttgagacagagtctcgctctgtcaccaggctagagtgtagtgacgcgatcttggctcactgcaacttctgcctctcaggttcaagcaattatcctgcctcagcctcccgagtagctgggactacaggtgtgcgccaccatgcccagataattttttttatttttagtagagacagggtttcaccatgttggccaggatggtctcgatttcttgacctcgtgatccgcccgtgtctgcctcccaaagtgctgggattacaggtgtgagccaccacactaggccatttttaaatttttttatagactaatttttagagcaattttaggttcacagcaaaatttagcagaaagtacagagagttcctgtatatcaccctgctccatacgcacacaacttgcacagcctcccccactattaacatcgtttacccaagcagtgcatttgttacaatcagtgaaccttcattatccctttaaagccatagttcacattaggattcacttcttttgtttgtttgttttgagatggtatctcgccctgtctctcagactggagtgcagtggtgtgatctccgctcactgcaacctctacctcctgggctcaagcgatcctcccacctcggccctcccaagtaactaggaccataggtgcccactaccacacctggctagtttttgtattttttgtagagacagtgttttgctatgttgttgtatctggtcttaaactcctgggctcaaaccttggcttcccagagtgctgggattataggtgtgagccactgcacctggcctgtgtgtgtgtgtgtgtgtgtgtgtgtgtgtgtgtgtggcggggaggggataggattgttctttgtcacccaggctgcagtgcagtgtggcgtgatcatggctcactgcagcctcaacctcccaggctcaattgatcctcccacctcagcttcctgagtagctagtattacagatgtgtgcaccacgcctggctaatttttgtatttttttggtggagaccgggttttgccatgttgcccaggctaggagttgactcttgctgttggacatttataagttttgatgaatgtataatgacatgtattcactatttttttttttgggggggacagagtctcactgtgtgccaggctggagtgcagtggtgcgatcttggctcactgcaacttccgcctcctgggttcaagcgattctcctgcctcagcctcccgagtagctgggactacaggcctgtgccaccacgcccagctaatttttgtattcttattggagatggggtttcaccatgttggccaggatggtctcgatctcttgacctcgtgatctgcccaccttggcctcccaaagggctaggattacaggtgtgagccactgcacccagccatattcaccattataatatcagacagagtagtttcgttgccctaaaagtcctctgtgctctctctattcatgccaccctccttttccccaagccctatccactgctgatctttttactgtctccatggtttagccttttccagaatgtcctatagttggagtcattcagtatgcagcatcttcaggttggtttatttcatttggtgataagcatttaaggttattttcgtggcttaagggctttctttttttttttttttttttttttgaggcagagtctcgctctttcacccaggctggagtgaagtggagcgatctcggcttaccgcagcctccgcacccctcccccacaggttcaagcgattctcttgcctcagcctcctgagtagctggaattacaggcacccgccaccatgcctggctaattttgtatttttaatagagatgggatttctccatgttggtcaggctggtctcaaactctggacctcaggtgatccacccaccttggcctcccaaagtgctgggattacaggtttgagccactgcgcccagcatttttttttttttttttgagacaggatctcactctgttggattgcagtggcgtgagcacagcttgctgcagcgtcaacctccagggctcaaatgattctcctaccccagcctcctaagtagctgggaccacaggcctgggccaccacacctggctaatttttaaatatttggtagagacaaggtctcgctatgttgcctaggctggccttcgactcctgagctcaagtggtccccacgcctcgacctcctaaagtgctgggattacaggcatgagccaccttacccagcttcgtttctttttagcactgaataagatctcattatctggaagcaccactgtttatttattcattcacctattttttttttttttttttttgagacggagtctcgctctgtcgcccaggctggagtgccgtggtgcgatctcggctcactgcaagctctgcctcccaggttcacaccattctcctgcctcagcgtcccgagtagctgggattacaggcgcccaccaccacggccggctaattttttgtattttcagtagagatggcgtttcaccgtgttagccaggatggtctcgatctcctgacctcatgatccacctgccttggcctcccaaagtgctgggattacaggcgtgagccaccacgcctggcctcattcacctattgagtgacttttttttttttaaactttttttttttgtttgcacgttctggttgcacgttttggcaattatgtgactgatttacattaaaaaaatttttttgagacagggtctcactctgtcgcccaggctggagtgcagtggcgtgatttcggctcactgcggcccatatctcccaggctcaggcgattctcctgcctcagcctcccaagtagctgggactacaggtccgtgccaccacgccaggctaatttttgtatttttagtagagacggggtttttagtagagacagggtttctccatgttgcccaggctgatcttgaactcctgagctcaagtgatcttcccccgtgcccgggctcccaaactactgggattacaggtgtgagccacctcgcccggcctgattgattgacatttaatgccttccaagaggctgtttcactcctttcccactgagaggcaggaaaggagctcccgtttgcttcctgctggtgtgtgtggggtgtatcttgtctttgcaggactctggaagctggtgggtgtcaccaggagtgtgaatgggtctgtgtgtgtgcactttgtgggaggaatgttcataagccagctctgcttctggaagcatgagccccagccatggtttgggccaacgcaggtgccaccacggcgacttgttttcctcccttgcgggtggaggcctccgctcactgcagggctgccccacaggtctccttccgctaccactgccagctgtactccgagtggagaaagaccaaccagaaagttcgcctgaagatccgggaggcggacagccccgagggcccccagcattctccactggcagctggactcctgaagaaggtggcagaggagacaccagtatgaatgctgggctctccggaccctgcagcagagaggccagaggtagctggtgataccctgtcctgtggaaggacttccacttcaacacttccacttcaacagttcccgcacggcctgaacgcttcttaggccaagagacaccatgcagagcctagtctgtgatcctgtgtgaagatattttcagggtttttttttttttttttttgcatatggaggacaggtggacatggtcctgagctctggacggagcaggcaccctgatctcattctgaggtccacatggcaccttctgggccagcagctgtggccggtgtatcaagggcgcccttaaagctggaacattccagcaagcttcttgcgcttctctgcacccggcaggcccactttcctggcaccctcgactttatataaaagttgcactgcgtttcaaaaacccacccctgaatgaataaaaggagccctggctggacaaaatggacttgtcagttatgtttctcaaaggaggcctcccagggagggaccacatggaggtaaaaaaataacactggcggccagccaggtgtagtgactcactcctgtaatcccagcactttgggaggctgaggtgggtggatcacaaggtcaagagatcgagaccatcctggctaacatggtgaaaccctgtctctactaaaaatataaaaattacttgggcatggtggtgcgcgccggtaatcccaggtgctacacaggaagctgatgcaggagaatcgcttgcacctgggaggtggaggttgcagtgagctgagatggcgtcactgcactccaacctggcgacagagagagactccatctccaaaacaaaacaaaacaaaacaacaacaaaaaacactggttggccaggcacagtggctcatgcatggaattccagcactttgggaggctgaggtgggcggatcacaaggtcaggagttcgagaccagcctagccaatatggttaaatctcgtctctactaaaaatacaacatgagccaggcgtggtggcagatacctgtagtcccagctactcgggaggctgaggcaggagaatcgcttgaacccgggaggcaggggttgccgtgagccaagatcgcaccattgcactctagcctgggtgagacagcgagactctgtctcaaaaaaaataaaataaaataaaaaacaataaaaaccactggcttgttttgagggatctgttctgaagcccatgggaagaagcaaaggctcagtcttcaagtaaaaatcaggtagcagggttataaaaatgatttttaaaatatacatacgggctgggcatggtggctcatgcctgtaatcacactttgagaggccgagatgggtggatcacctgaggtcaggagttcgagaccagcctggccaacatggtgaaaccccatctctactaaaaatacaaaaattagctgggcgtggagacgcacacctgtaatcccagctactcgggaggctgaggcaggagaatggcttgaacctgggagacagaggttgcagttagctgagatcagttgcaccactgcatttcagactgggtgacatcgtgaaactctgtctcaaaaaataaaaaatagaaaaataaaatagacataagaacaatttcctcttactttgcatctgccagtccacagaccatgctggcctctgtttttctttttttgagatggggtcttgctctgtcacccagattggagtgcagaggcacaatcacacagctcactccagcctcgacctcctgggctcaggcaatcctgtctcagcctccctggcagctgggacaacaggcatgcaccactgcgcctagccactgttagtttttagttaagtgtagagagtccagcatgggccaggcctggtggctgatgcctgtaatcccagcattttgggaggcttcggcaggaggatcagttgagcctaggagtttgagaccagccttggcaacatagtgagaccctgtctttactaaataaataaatatataaatatatatatattagctgggcatggtggcatgcacctgtggtcacagttactcaggaggctgaggtgggaggatcccttgaatccaggagttccaggctgcagtgagctataattatacttctgttgtctattctaggcaacagggcaagaccctgtctctaaagcaaacaaacaattttttaaaaatggtgacaatatccacgctgacttagggtgactatagattaggcatagttccgagtctctccctcctttgactgtcacttgttagggaagaagtggttattacctacattttacaggtgagaagactgaggcccagggcagggaagccttaatctaaggtctcagagctgtaggaagtggagccggggtgacaccaggactccttttggaggaagactcaggaaagatgcagaatacgtgtttttttttttttttttttttttttttgaaacagagtcttactccatcacccaggttggagagcagtggcgtgatcttggtgatcttggcttactgcaacctctgcctcccgggttcaagtgattctctcttgcctcagcctcccaagtagctgggaccacaggcagctaagttttgtatttttagtagagatgaagtcttgtcatgttgaccaggctggtctcgaactcctgacctcaggtgattcacctacctcggccccctaaagtgctgggattacaggcgtgagccaccgagcctggcccagaatgcagttaatctaataacaacacctacttcttcagcgctttctgcctgccgattcttttatatttaaaggctcttggcatctgtctgcttttaaagctcagggcaaccctgaaaggtgagttctggtgcctttctttctttctctctctctctctctctctttcttttctttctttctttcgacggagtctcgccctgttgcccaggctagagcgcagtggcactatctctgctcactgcaacctccacctcccgagttcaagcaattatcctgtctcagcctcctgagtagctgggactacaggcgccaaccatcatgcctggctaatttctgtatttttagtacagatggggtttcgccatattggccaggctggtattgaactcctgacctcaaatgatccacctgactcggcctctcaaactgctaggattacaggcgtgagccaccgtgcccagcctggtgcattgcatttcttattatccatattttcagttaagcaaactgagcctcagagtggaggagctgattgctcaaggtctgttttccatatgaatccctgcctggtatgtagctcactcacaaaggaagaaaaactttctgcctggactggaagggcaaggagaagcctgtgtggccatgggagtggaggaaacagctaagcacaaaggcccagaggctggaaactgcttagcctgtaggaagagcagcagggaggaaccccagggctggagcagtgtgattgaggggcaggtggctggagagatgggcagggcctcctaggcatggggtgactgacgcaccagtggtctgcaaaaacggagcatcacaccagtgcgcatgagctctcctgccccttgggggggccttccttgctcctgcagctgaactccctacacagcctgacacccatctttcctcaggccaactttggcctgtggtgccccaggagttgatgtacagatgcctcaggacatgccatgaggaagagagagacgagatggggtgactcatgcctgaaatcccagcactttaggaggccaaggcaggaggattgcttgaaggctgggagttagagaccagcctggccaacatagcaagaccctgtctctacaaaaagagaaagaaacagagagagagagaaggaaaagtgttttctttgcaaatctattctaatactttcatagagaagagttttagtttggtgttaacctgtctttaataatcctctaaggaccagcacagtggctcacgcttataatcccagcactgtgggaggccaaggctgtaggatcccttgagctcaggagttcgagaccatcctgggaaaaacggcaagaccctatctgtaccaaaaaataaaaataaaaaattagccaagtgcagcggcgtgcacctacagtcccagctacttgacaggctaagcaggggaggatcgcttgagttcaggagttcaaggttgcagtgagctatcatttacaaaggtagattgaaatattattgataggctgggcacggtgactcacacctgtaatcccagcactttgggaggctgaggtgggcagatcacctgaggtcaggagtttgagactagtttggccagcatggcaaaaccccatctctactaaaaaatacaaaacttagccaggcgtcgtggtgtgcacctgtaatcccagatacttggaaagctgatgcagaagaatcgcttgaaatcaggaggcggaggttgcagtgagctgagatggtgccactgcactccagcctctgtgacagagcaagactgtctccaaaaaaagaaaaaaatatattattgataatcgctgcattgaaggccaggcgcagtggtttacgcctacaatcgcagcactttgggagcctgaggcaggcggatcacgaggtcaggagttcgagaccagcctgaccaatatgatgaaaccttgtctctactaaaaatacaaaagttagccgggcgtggtggcatgcacctgtaatcccagctactcgggaggctgagacaggagaatcgcttgaacccaggaggcggaggttgcagcgagccgagatggcgccattgcactccagtctgggcaacaagagcgaaactccgtctcaaaaagataatcgctgcatcttactgcccaagttgccacaagcacacgtaacatctgatggtgccaattcgactgtctgcacttggaaaatggcacattggaggctgcacagcaccataaaactgatgccacgaatgcacacaaaaataagaccatacagcattatgcctagtacagaatacaccctgaattctgtcacagttcactttatgcaacattgcaagagtcctctcgctctttattattatttttaatttttttgagatggggtctcactctgtgaccaggctggagtgcagtggcccgatcttggctcactgcaacctcctcctcctgggttgaagcgattctcctgcctcaggctccccagtagctgggattatgggcgcctgccaccacacccggctaatttttgtatttttagtagagacagggtttcatcatgttggccaggatggtctgatctcttgacctcgtgatccacccgccttggcctctcaaagtggtaggattacaggcgtgagctgccgcgcccagccattaattttttttttaattttgtttttaacttttaggtttgggggtaaatgtgaaggtttgttaaataggtaaacacttgtcatggaggtttgttgtacagattatttcatcacccaggtattaagcccagtactcaatacttatctttttgttttttgagatggagtctcagtctatctcccaggctgcggtgcagtggcgtgatctcggctcactgcaacctccggctcctgggttcaagcgattctcctgcttcagcctcccgagtagctgggattacaggcgcccgccaccacgtccagctaatttttttatttttagtagagacgcggtttcaccatgttggccagtctggtctcgaactcctgacctcaggtgatccgccgcctcggcctcccatacccaaagtgctgggattacaggagtgagccatcgcgcctggccccattattagtgaattttaacagttttccgtttcttctggacgaactgtttgcaattataatgcgaattacggataatactctgatattattccatgccgttccgttgttgcctacaaagttcgcgctggagaaccgcgcaattgcgttacaaaaagaaaaaaatcacacaaaaagacacaatgttttaagaaagtttacgaatcgtgtgccggaccgcgggttgaacaagcttcatctaaaacttccaggaatctctagacaggatcattgcttcccctctgctccagctctggttacagaaagctgagagtgactaggtctaggtgtttgtgtggggtggggtggggagatgcctcctctatcggactcagaggacgcgcgccgggaacagccagtcggtgcctaacgcgagtgtatctcgagagagaagcgatcaacagctgccggtctgcgcctgcgcgcggcgggggcgtggcccggggcgagtggggccaaggaggcagccgggagcggcgggcgcaggtgttactggttgcgtcgggtcacgtgggcgcgcaggcgcagcgcggtgcagcccgttcgctcacacaaagcccagacgcggagaaaatggcggcaggggtcgaagcggcggcggaggtggcggcgacggagatcaaaatggaggaagagagcggcgcgcccggcgtgccgagcggcaacggggctccgggccctaaggggtgagtatcccacggtcctttgccacgggtaagggttcctctccgcggccgacgcgggcggcggctccgttaggtctgttggcggcctagccccggcgcggcctcggccccggctgttcccgtaccgcctgctcagggtagcggcgtctagggccgtgagcggggagccgggggagcctccagaatcgtcccctacaccgggcctcgagcctcgccaccctcagtccctccaggccggggccaaccccgtagtcgaggcctcaggcccagctgctgcgcatgggggttgatggcgcgggcccggaccggagagcctccgaggcctacccgaccgctccccgggagggtgacctcgggggccgggtttcagccccccgtcccctctcctcccggggtctgttttctgatccgtaacgtggggggaggagagagggtgcgcgcccgggaggcctcgcgcgcagtcagcccgagtcaacggtaaccgagcgagggaagcgtcaggaagggccgcgaagccgggtcggggggctcccctcctgccccgccccttagtccccgcgcgccgaccgcgctccgcgggaagtgcctccctcggaaccgcccctcgccccacgctctggccctggctcaagtccctcgccgtttcccgctcctcctccccgggtgcgccgcaggtattagtggagagatgggatctgctgcttagcgttcaccctcggaagcagacagatacgaagtcgggggaggaatcccctttttcccgtgtttcggggaagctgttctgtcaggaggcgggttcatttacttccagacttcatcagcttttcgagtcctgcttggggctctttgactccttggcttttaaaagtttctttaaaggaggaagcatcgacttgtgccccggtgaaactcattcattctgattacagacacttaagagagacagagaggttttggctccaagatcagcggccgggaaggaaggggaagcctgggtacacattgaatttcccagacatttatttcattgtggtaaaatagacataacgtagactttgccattttaaccattttttaagcgtataattcagtggcattgagtatactgactcagtgtgctgtaaccgtcactgcttcatgtccagaactttttcatcatcggaaacagaaagtgtagctattaaatactaactccctccgttttctttcctttctgtctgtgactttgccttcctcatattgtaatgtgtgaagcttagtttatggagattaaaagtgaatgcggttgagcacttatatatttaatttttttctttgagacagggtctccctctgttacccaagctgggatgcagtggcacgatcacagatcactgcagcctcgaactcctgggctcaatcgatccttccatctcagcctcctgagtagctgggatcacaggcgcggcaccaccatgcccggctaattttttgaagagaggaggtctccgggtgttgcccaggctggtctgaaactcctgggttcaagccatcctcctgcctaggccttccaaagtgctgaagttacaggcatgagctactgcgccctgcctagttgagcgcttaggttaagaacgttccctaagtgctagctatattggtagataataaatccggagaaaattccagattctttccctccttaagtagggagaaataaaataccatggttactggcccttagaaatgagaaaaacttcctctattcccagcattttactattgaaaactctgggaaggaatgtgttaattttgactttttcagcgtctatctacggaagctggtaggatttctgagggtggtatttggagggctttaagataaatttatttaccgtatgcaggaaggagtgctggtagaaccttgctagatgatagggtaaattaatagattacaaattttcccttttcccctgtccattttcaaatagtcattttgtgactgagtcattttacaaatacatgtggactgttggaacctgaaaattgtagaataaaatagccgttgtgagaaagaggctcaaagtctcaaagtctagtactagcttcatagaggatagtttaggaagctggcaacacttggatatttttgatagggcctgtggaaaacttttttttttttttttcattacaagtcttaaggaaatctctttagaagcctatacttttgcactccatgcagagtggagaggccattaacatatttgtatgttatgtatgttatgtaattaccataacataaggtaattatgctgtgatagaagttagtggagttgcttggtagaaagaatggaggaggtgacctccgccacctgctgggggcagggacctgttcctccatgacaggaagacgtgtggaagtggaggagaagaagatggttggggaggggcagggaagagagtatccaaagagcagagatttgagtgtatgctttatcgagaactgaagttgtgctgggtgtagtggctcacacctgtaatcccagcactttgggaggctgaggtgagaggactatttgagctcaggagttcaagaccagcctgggcaacatggtgaaaccctgtctctaccaaaaaaaagaaaaaacaaaacaggctgggcccggcggctcacgcctgtaatctcagcactttgggaggccgaggcgggcagatcacgaggtcaggagatagagaccatcctggctaacacggtgaaaccccgtctctactaaaaatacaaaaaattagccgggcgtggtgccgggctcctgtagtctcagccactggggaggctgaggcaggagaatggcgtgaacctgggaggcagagcttgcagtgagccgagattgggccactgcactccagcctgggcgacagagcgatactccttcttcaaacaaacaaacaaacaagaacactgaagttgctatagagttttaaggttggagcactggcagccagctgatgggcagtgaatttggatttttatcttgaaagcctttgagagacaggagaaaaatagaaacttggttctttggaattctttctctaccaggagtggagtgtgcagtagaccacaaatgcagtgagctagcaagcttgatctgggaacccaggttggaaatcttgttttgcagttacttctctcctgggtgtgagaataggatttgcttaattttgatgagaagtctgttccaattaaagtcagcaaagattcagagttagggtatagtcagggaaaaaaaagttcattttaggggaatgtataggtttttaaaatttttttaaatgtagtatcatatataaaataaatgacttaacctgctccccttcctgagtaatttttttttttttttgagatggagtctcgctctgttgcccaggctggagtgcagtggcgcgatctcagctcactgcaagctccgtgaaccgcttcccgggttcacgccattctcctgcctcagcctcacgagtagctgggactacaggcgcccgccaccatgcctggctaatttttttaatatttttttttagtagagatggggtttcactctgttagccaggatggtctcgatctcctgacgtcgttatccgcccgtcttggcctcccaaagtgctgggattataggcgtgagctaccacacctggccccttcctgagtaattttgtgggtgaataagaaacagatggattggttatttataaaaataaaaatatatatttagggtagattcctgaggaggtactgttagagttgactccatttgacaatcaagaaaactttcgttttaaacacttaaacccaggttcaggaacctgacctaaagactccaggggaggccctcctgactcccaggcagcttgctgctttcatgatactaccttggtaaccactcagtaaacagccgtttgaattgttttatttaaatcagattctctatacaatgcatttgagtgtttgctgtactttaaagagtgattgtttattcaaaaaggattttggagacacgtcagattgtgagctcaagattagaagacagggttttggattatttgaatgcatgctgccaggcctttgctttcactcagctctttgattttattctggttagggaaagagatactagcctgcaaagattagcttgcttgtttttttgggagggggggttctccaatggacttccccattaccatattttgcagtcatagggttgaaagctaaattgtccctttgctagtctgtaatgattatgatgcctaggttttctcagccttggctctggtttgctagttttaaagcctgaacagtagaaggctaggagtgaatcagtccccctctctacccttctcaataaaattattggtagaaaaatacatcattgcctcactgtgtgctaagagtctcttttttttttttttttgagacggagtctcgctctgtcgcccaggctggagtgcagtggcgggatctcggctcgctgcaagctccgcctcccgggttcacgccattctcctgcctcagcctcccaagtagctgggactacaggcgcccgccactacgcccggctaattttttgtatttttagtagagacggggtttcaccgttttagccgggatggtctcgatctcctgacctcgtgatccgcccgcctcggcctcccaaagtgctgggattacaggcgtgagccaccgcgcccggcctaagagtctcttttaaagctgtaagcgtgtaggtagtagcctccataggaccgaggcctagtgacgacatggtgaccccagctcttagccacatgcagtactgcttccctagatgagctgctttttgttttgccattctttgttgattgtcacagtgtccctctgagctaccatgcatacaggttgcgctggttttgctggtaaagcgctagagacagaaagagcttgagtcatgtgggtagttcagtggtggccttggagctggaatggtgctgtgaatagtgctctccacaccttacatgcattagagcagcgcaggacttgagggatttctgtgaagaatcactttatataagggatggttctcacacgggcagaggggtccttgtccctcaggagatgtgatcacaatttcagggtattgggattgccatttcaaactgcaccctttccttgattagaaactccaaaagtagtgagtgttacgcatgggaactgcatggagaccttaagagagggtaggcagtcactatttggtggtggtcttttgcagattaggcactcaatctttttattagggtttttttgttttttgagatggagtttcactcttgtccctcaggctggggtgcagtgtacgatctctactcactgcaactccagctcctgggctcaagcgatccttccacctcagccttctgagtaaataggaccacaggcacatggtaccatgcctagctaatattttgtagagatggtgttataccatgttgcccaggctgttcttgaactcctgagctcaagtgatccgcccaccttggcctcccaaagtgctgggattacaggcattaatcgtatttttaatttaatttaattaattattattattattattttttttttttttgagatggagttttgctcttgttgcccaggctggagtgcagtggcgctatctcacttcactgcaacctccgcctcccgttcaagtgattctcctgcctcagcctcccaagtagcgagtagctaggattacaggcacccgccaccatgcccggctaatttttggttttgttttgttttgtttttgagacggagtttcactcttgtcgcccaggctggagtgcaatggcataatctcggctcactgcaacccccgcctcctgtgttcaagcaattttcctgcctcagcctcccgagtagctgggattacaggcgcctgccaccacgcccagctaatttttgtatttttagtagagacggggtttcaccatgttggccaggctggtctcaaactcctgacctaagataatccacctgcctcggcctcccaaagtgctgggattacagacgtgagccaccgtgcctggcctaatttttgtatgtttattagagacaggtttccaccatgttggccaggctggtcttgaactcctgacctcaggtgatctgcccgcctcggccccccaaggtgttgggattacaggtgtgagccaccgcgcccagccaaaagttaaaaagacttgcagagttaagtttttatatgtacgtatacatatacatggactagagaagaatcttcccctaattttgtcctgaagatagtgagaaaataggattggacatgttaaaaaaagagcttttcaggacatcacttttatactatcacatcatctaaacttgaatatgtccctccccttccccttccccttcccttgccgagacagggtctcccgctgttacccccggctggagtgtagtggtgcaatcatggcttactgtacccttgacctcctggagccagactgtcttctttctgcatagctgggaccgcagttgtgcaccaacatacctggctaattttttgtattttttttgtagggacacggttttgccatgttacccaggctggtctcaagactcctggattcaagcactcagctcacctcagcctcccaaactgctgggactgcaggcatgagccaccatggccagtctgcttgaatatgtgtctcgaatgatatttctttgagggtcattctctacaagtctgtcaagaattagttggtggtggtagatttccaaaaaggtcaattttttaaaagttggaaatgacaagagatagttctaatctctttactgaggaaacctctcagagggaatgattagccagggaaggatttgtttgcagaggtgctgtgcccattaagcatggtgagagccgctttctcaatggtgagtcatgtgatgtggattaaccccaaaccaaatgctcagcttctgtggttagattggatagtttattcgtagccatggtatgcacctgtggaatataggttagacactttgttacctgctttggctgtaattatttatttatacatttcgtagtttataggtgagcttaagcagtctggtgaaagactggaaataattcatcatggactctgtcagaatgttttttattgtaaatcttaaagtatttgggacttcaaaagtaacaatattaaaattcatttccatctgtgaatcctctggtggaccatgatgtgtagattctgttatgttttatgattttttctaacacagtcgtcgtcattttccaggaaagagtaggagatgatttggcagatagattttgtttggcagactttggtgaaggactttcttttggagtagacaagtggcctgggtaacagttgtaggtctcctgtgggacctgctttgtggtgtgaagccagtcttgtggactcaggtagattgcgttctaggcatctagggattggagctgccataacatcaccttatctgccagcccgtgggaagggaagcctgttgattgtgtattggtatagttgagagatcacagaggaagctgctttccttggttttaccttgtgttgatttgggtgtggctcacaccagtgatacctctgctgggataccacttggcactcttgtgtttggggactacacaaagttgctgactttaaaatttttccaagtaaatacgttactatttttgagacagggtcttgctttgtcaaccaggctggagtgcagtggtgcaatcatagttcactgcaatcttgacctcctggactggagccatcctctcagctcagcctcctgagtagctgggactacaggtgcacaacaccacactcagataattattattatttttaaaaataaagacagggtcttatttgtcgaactcttgggtttaagtaagattctcctgccttgacctcccaaagtgctgggattataggtgtgagccaccatacctggtctcaagtgaatacttttgtttgtttgtttggagacagagtctcattatgtcactcaggctggagtgcagtggtgcggtctcagctcactgcaacctccgccccccgggttcaagcgattctcctgcctcagcctcctgagaggtgggattgcaggcatgtgccaccacgcccagctaatttttgtatttttagtagagatggagtttcagcatgttggccaggctggtcttgaactcctgacctcaagtgatacacctgcctgagcctcccaaagtgctgggattacagatgggagttaccacacctggcctcaactaaataacattttaaaatagtagcttctccagctactatctggtgtttcttccacggaagaaagttacatcccagaataaagatcggctcttcagttaaagatacttttataaatcattaatactgtagtcttggctttttggttttttttccggttttgtcatggattacaaattctgtagtagagcccgtggtctgggagtcactggattctcactggcgggacacacagggctggggaagcagaaggtgcaaggctcagttgcttaagaaacttgaggtggcttctggctcctcacttgttcctgatcagctctaatctgtgcctccctgtagtcagaggggttgcgcttgagctggcagctgaggaaagcgccctgtcagccagtgcccgggcttccaagcctgatggctgctacctagagatggttagtgttaacagtgtggtggcacctagcacacaaaggtaaagagtgcaatgggaaggccgtgccagaaaagcagccacccttctttgccaaaggtgggattgtctgcatgctgtcttccacctcccagggttgctcagacccaagtttcccagcttcaaagtagtaggattgtgtagggagtggtttcttttccacctttctggatttttaaaaagtggttaaaatatacataaaatagaccattttaaccatcttaagtgtgcagtgaagtatgatgttttgcagcaatctgcacattcctggaacttttattctcatcccacatgaaattctatgctcagtatttaataacttcccatttctacctccccctaggcccaggtaacctctgttctactttctgtgtatggatttgcttattataggtatttaataagtggaatcatacaatatttggccttcagtgactggcttatttcactgagcataatgccctcaaggttcatgcatgttgtagcctttgtcaggatttccttcctttttgtggctgaataatatcccattgcatggatagtccgtgttttgtttattccattcatctattggtagacacttggttgtttctaccttttggcttgtgtgagtagtgctgctatgaacattggcatatgtgtatgagtccctgcttttaattcttttgggtgtatacctagcagtggaattgctgggtcatagtaattctgtgtttaattttgagtgactacctaacttttccatggcggctgcatcattttatgccccccccccctttttttttttaacactatgaaagacacttatttgtgaagctaaaattggatgggcctatgtgtactacctcatatttccattctatgaagtcttagaaatcatccctctcttctcctgtttctgtcttggaattaacacaccttggtcagggagttggcctcaccattgtctctgttactgtccgtaggagtattttgtgagcccaggaaggtgtacctttccttgggaatgctttctgccctgtggagccttgagtttgaatgtcttaattcaaaaccaacattagtcttgtctttgctttttttgagacagggtctcgctctgtcaccctaggctggagtgcagtagggtgatcatagtttgctggagcctcgaactcccgagtttaagtgatcctcccatctcaccctccctactagctagtactgcaagtgcaccaccacacctggctaagttttatatatatttttttgttgttttgacagggtcttgctatgttgcccaggctagtcttgaactcctggcctcaaatgatccccccttcttggcttcccaaagtgctaggattacaggtgtgagccaccgcatctgaccaatactagtcttgtgtcatatgtaactttgtgtggaattgtaaacctggcaaatcaaataattatctttcacattgtgctgacatataaaccctttacctttttttcctctctctcgaattcagtgaaggagaacgacctgctcagaatgagaagaggaaggagaaaaacataaaaagaggaggcaatcgctttgagccatatgccaatccaactaaaagatacagagccttcattacaaacataccttttgatgtgaaatggcagtcacttaaagacctggttaaagaaaaaggtaatggtactggtgattgagtagggtgagaaggttggtgtgtcatcttttctgtggctaattccttggttatttttggtcagtggaagcggctctgggtagagcatgttctttccaggcttaagagtgaagcccccttaccccacctcagttttttttttttgttttgtgttttttttttgttttgttttgttttgtggtcatacccctgtgtgtcaaacaggatggtttgtatggtcctttggcctacagatgattttactggcttagtatggttaataaggcttcgattaggcttccggggagccttttcgtgttgaaattttttgaattttgcacgttaggtgggagagatttttcctttctttccttttttttttttttttaagctttttaagtttcacaggaagatagcttgtttaaaattttgtggatgtcttcctgggatcaaaatgtggtagctggaccttatgcttctcagattccaaactataaaacattagcttgtattttaacttttaggctttttcccctctgggaaaaaatagagtagactggccattggagagctcaaaataaggtatctgctttgtaacgcggtgccttaggatgtggattgtcatagcctaggtgtccaccttccagccgagggcaggggaagcagccaagctctgctgccaccaggaggcccgaggaggcctgcctctgtgatcctcacccccgtgcacactgtggtgtcctctctctctccttcttccctcctgtgctgctatcgtcttcctttctttcctgattcttggccctgctggtggcacttaggactaaagagactgctcagccctgggttagacaacaccgtggtagagaacaatttgtatattgccttgaggcgccctccccgcaccccgacctagactcaaactacccttcatggagtctttgcatgactgaaaggtattggttttctggagcattcattatgaaaagagatgtgagcttgatttgtcaaatgatttaacatttcagtgacagagatgccccgtggataggccattttggtatgtgtactggtgctccctgcattggattttgaaattatgaatggcactgccatcattgtcccatcccttattttgaccatgacatgcaagaagcactaggcactgtgaacctctccgtacagtcacgcgtgctgctcccacgtggcatttctccagataacacagatggaaaaacgttttggtgtgagattgatgtgcctgccttgatcagccaaatcattcctgccaatgctcctagggcaagagtgcagtttcttctttttgtctgagggtgtgtcatgctgcatcccagatgcagtgttcttggtttttgggactgctgcttcaatagaagcttagaatttctgtacagtacagttgggcctcattcgaattagcttttggaataacctccaaatttgtgttctcgtgatttggttgaaccgctgaattgctatttccattgataataaggtatagtagttccaagaaccaggaatgtggctttgaaaatgcaattgttagaattttgtaagagattgcaggccaaattattttttcatttttaggagtgtgtgaaccagttttgggacatgctggatgaagtaggtgacatttttactgctttaccattcagtaattcggtttgggaaaccttaaagctggtagtagcagcagcagccatggtgtttctggatgtagaagcagttcacctcaattcactattttgcactcttaagtgtggagccagcctggtggttgattgggatacttccaaactggttctcatattcccctggcatactgctacgaatgcctgggctcagccctctcagtgtatttttggtggtgtaatttagaattacaggtgtgcagtaaatcagttatttttaatgagccttaaaatgttcttgtttagagctcccctgtactggttaaattaattactttgctgtttaattaaattattagcggtataggattgtgggtaaagtgactcagaaaggtaatctttttatgataatgcttatattcagtatgtgaggtctaaagaaatttactgtgtttacatacatatgacttcttaagaaatactcttcttattacgtgctttcaaaaagacgtttttattcccgttttggtgtacaaaaaatgtttaagtggttagtttaaatctgaaatatttacttgaaatttgttgcgcataagttttaagtgttttgaagactttatacataggaagaactggcagatagaggcacttacaaccctaaaagtattagtctcaattccaaaacacagagatctgggctgttgtaacctaagcactctttatcagtctgtgttttaaggtctgatgaatcttagccttgtttcaggaaatgagtagaacaagaactggaattagttgtcctcaactgaaattttctgtcattatagcactatctaattgcagcctctcagaactaaagtagctagctttgagaggcccaagaggggagctttttttctaaggatactccggggggagattgtctcacatgctcctccctcactcttgatcctcttccccatctttcataccagctgcatattctccagctttaattttagcatttagcagcattctagcatttcctattaaaaatccacataggaagtaaactggtcatttatgcctttgaaagtgacttaacaggccacagctccccaggttgtatcctgacaggtaaagggatacacatcttaaagtgattgaccataaggactgggtggaaaaaataaagatttctgtgagaaaaggcgatcttaggcttttaaacttagtgtcgtgctacatttgtttgagaccaagtcctgtatgagtggaggaagctccttgctgggctgcttctcttgacctcaccaggcagccggcagcacccaggtggggcagtgccaccagagcaggactgagctgcacctgcagtgagtaaatagagcccaggttgaggaagaaaggaaggtcagggatgtagtttaccctcagtcgatccgaagtttagcagcagtcagttcaacttgtgtaagcaaagatttcttttaagcacttaatccttctgttagtataatacaccactttaagtaaatttcaaattgcatctgacagaaaactaaggcccagagggcaagtgtagtccagtagaaaacctccatcttggctcctggagataatttgcattgtgggtctattaggcagaactgtattttcaatttaaatgatattcctacccagtctacttgcttcttcatattttcctctgttggaaatgcagcctgtattttatttattttgtttttgagatggagtcttgctcttttgcccaggctggaatgaagtggtgtgatctgcaacctctgccccctgggttcaagtgattctcttgccccagcctcccaagtagccgggattaggcacccaccaccacgccgagttaatttttgtatttttagtaagagatgggctttcaccatgttggccaggctggtcttgaactcctgacctcaggtaatctgcctgccttggccttccaaagtgctaggattacaggcctggccgcagcctgcattttagaaaggcctgttatgctaaagcgttcatatgtatgaatacttaggttgagccccagcagtgcagcctgtctggcttaccccgtgtggtctctggtgttagggaagcagtaacgttctgttattgccacgcaattgaggagcgtgggctcagtcatttcctaacatgtccataagccaagtaggtgtgtagaataattattttgccatgtttcaaggtgtctttatattaaagagtgtgcatgtgttctgtgcactcccctcgcccaatagagtggcagcctgagaattgaccgttatgagatgaagaatgtttgacaacatgcctgactttcaagtccccccaactcctgttaaaaaaaaatatataggtcttataacatgtgaattctcttcagtgaagcttcggcactgtattccctctttttttctttttcagacttgagcagtaaatgggaacacaaaaacaaatactcatttggctaaaggtctgtgcaggagagtgaggtcacagtagctcccagggaccgcctgagttctttttgggttgctcatctgcttatcctcctgatgtgttttaagaataaggcagtctttttaataattcacttaaatgttggtcaaaaatgatttcttagagcattttaaatagaggtagataacagttggtgttagattttttaatgtcttagttttttcaatattttgatgttttaagctgcagtagaatttgtcttagcagcctactcttgggattccatgaattccatccatgtttacacagggggaggagcaaccgtattttttattaataactgtgagtgccgtttctgtaagactgctgctactgccaagctgtcacctctacccctgagtcctgactgtgtgatctgctctggatggtttgctcgttaaacttcacttcatggaatgtgaccagactgtttacttgacaaattttgccctcacattcttgtcgatagttgtactgactacataaaataaatctttgctttgctattgtagaaccaaaagggaggtggtcttttaaaggctccattttcctataggaaagtatgaattagcagctattgcagatcccttaacacttaatggatggtctctcagggtagaggttggaattttatgagtttgtgaggaggatgggcattactgatgatctcagggacagcactactcatgctggacccccgggtgactgctaaatgatgataccacttgaggtaaaaagagggagaacgttttaagcaaatttttaatacaaaggattgagtcaggtgtgctatttctagactagactgttacgtggaaaaagtcctaatttctaaacctctctttttgttaaagtggttatggccatgggaaaaagtttggtttggatttgcttggtttctgggttgcaattacagctttttgatccaagcgtcttatggacacagactagaaacttcccatgcaactgggacttgaatttcggcaacatggttgcagctgttttgaattaattattgtgagtcttttattttttaaaggttattaggtggtagtcatagctggtaggaaatcaacttggggcctcttcagtcactattttgacactatgtggcattttcatcaaagtggagacaagggttggtggtccttgaatggctgctgctcttgaaacaaatggctttttaacatggcctcagggcggctgcatttttggaactgctttactttttaagggttaaataaagccgctttgtacaactgtcccttggctgtgatcatttttcagtttgccccacaggagtacatactctaaaagtaaattgtactgatccctcatatttccgttcttcatttctttgcactgatgattctcctgttttgtacaaagtgtcagtttcgttctgaaacatttcaggagaggacaaagagggtgaggctctagatgtaaactttggacacttggctttcttgccttcaaccaatgtgcagagccattaataaatatgtccttcagatctttaaattttttgtaaaataattttaccttgtttttcattaaaaatttttcttcctatagcctcataattttaatgtcctttaaacaaaagagttggaataggcatgacttgttgaggccgttaagcgggttatttttacccttgtactgctaaaccaaaccgatccagaggacaacaaaagcccattttttgcctttggagagtctggttagagatagttttctccagggtaacactttacatttgttttctgtgtgccatcttcaagttcagcagccattttggtggttgtcttgatggattctaacatctggtcatggtggtcatgaattggcaatccaaaccttgaggaaaatctgcagaaacttttgaaatgctttggttttttcccttttgtgtagattagaatcatatgagtctgtttaactgtttagatacaaaatctgagccctaaatttgaatttatttgtgtcctttaaatggggaggtttagaaagcggcaagaatgaagcctggcctaattcactgaagagaatccagatgctgctctggttttgtgatcttattatattcaaacattctgcctctacagatgtggagcctagtgctgtgtgcaggaccagctatagaatttgtggggcccaacacaaaacgaaaacaaggggcctcttgttaaaaaaaaaaactaagaatgtcatggcagcgataacagcattaaaccaagctcagggcccctgagtgcggggctctgtacaattgcacgagttgctcacctgtgaagctggccctgcggccgtgtgtgcctgtgagcttataccttcgcatacgtgcgtccttgtatttatagcatgtgagctcagcccgatggcatcgcaatttgtatgcatttcacctgcttgccaccaatgagagcgtatgtgtaaaacctcctcccttccccagaaaagtaaatcacgcagacttctttcctatagatttggattgcctctagtcatgaatgagtcttccagacagggaaattgatacggaaatctgtggaatagcttgtttgtggtgggaggaaaatcaaggacatattgttaacgtgttttcacctacttttactgcacacctgtaatgcctagttcggtggtttagagaatatggagtgtttctgggctttcttataaggcagaggctccatacaaggttgctgatgattgttctaaattcccattgttttcttggcttttctcccttggtttatgtgtcgtctggaaactgatttgtagttggtgaggtaacatacgtggagctcttaatggacgctgaaggaaagtcaagggtaagtgtctgagagaatttcttctgtggatttactacatgaaaaatgtaactgtatggtggcgtggaatcgaatgaaatcaggaaggcagtgagtgctcatgttacagtagctatgtttgattttgccaaacatttgagtggggtgggaggggatttgcaaatgggagtcccgcttttccaaatggctggccaaagagctttttggtattctgtttggatgcccaatttggataactggggaccaatagcagcattgtctctttgttaacagaggaattggctgtgtgtgaattatgcatggaattttagcggtggtataattaatgtaaaacgtgtgttcttgtctagaaaatgttactcttggttgtttgctgaatttgaaagttgtgtgaaccaaagattccgaaaagttgcctttgtgccagtaaattgtaaaccaaatattaaaaacctgaatgttcaaaattggcctagtttaaagagaacataaactattttctgtcgtgcaatagaatggcttagaataatcaaaaggatgagcttaacttacggaagggatggatttaggaggaatatggtaaggactcgattgagtacagagggaagcagatctaaagttggtgtgatttcttggagaccctgaatttaggtctgcttattaaatgtcagcagctctagtgcaatgctggtaacgcgtaggagaaggagatattaaggagcccagcttttaacaaggaaggcgaggcgaggcacttctgtcagcttccccttagaagggttcattttaaaagactaactttgtgacataaatcatatttttagtttgtttataactgtcattgatatttactatttttttcttttctttttccccttccttgctcttctgactggtctctggcttcctccaaagggatgtgcgtaagtatcgtctagttacttattggtatttgagccttctaacttgtaggactggtttcactcgactcgtttccttttgactctatagtgttgttgaattcaagatggaagagagcatgaaaaaagctgcggaagtcctaaacaagcatagtctgagcggaagaccactgaaagtcaaagaagtaagctcttgcttaacactgcggatactgtgtgtaattgttgagtgatcctactttggaattagggaaagacggtcatggtcccagacggcatttacaaagcaagtgccagcctgttgtttctaatgaagagtgtcggtcatagcctacagcagccattccctgcaaggactttggggtggtggccaagcagatcctgagtggctgctgaccaccttctaatatctgtgatttgtctgaggccttgttgtctcagggactctcaaaccatgagcccgtgggtttgtgccattaagttttactccatctgacccttcttcttggcccatcttttttctttttttaaaaagtgagtttgttccagcctgggcaacatggtgaaaccccctctctacaaaaggtacaaaaattagccaggcatggtggcgcatgcctgtagtcctagctacttgggaggctgaggcaggaggatcatttgagcccaggatgtggaggttgcagtgagctgagattgcaccattgcactccagcccgggcaacagtgagaccctgtctaaaaaataaaaaaataaagtgagtttgttattcctcaaacctgctttcacatctcatctgaatcaaatatattccttgaggaagaaggtttttttgttgattaaatccctcttggctgggcgcagtggctcacgcctgtaatccccagcactttgggaggctgaggtgggtggatcaaggtcatgagttcaagaccagcttgaccaacatggtgaaaccctgtctactaaaaatacaaaaaattagctgggcgtagtggggggtgcctgtaatccatctactcgggaggctgaggcaggagaatcgctggaacccaggaggcggaggttgcagtgagccgagatcgcgccattgaactccagcctgggcagtaagagcaaagctctgtctcaaaaaaacatccctcttaacttcttttcacctcttctcttggggaggaagatgagtagattcagagtgaagcttggtagggtctaaggtctctcatgtgttatgatgtcttttttagtgctgatggtggtaattgacaggacagagagttgaagaagagagtcagtacagagcttcacagaccttcccagatgttgttttactgcgcagccctcacacacacgcctccaacacctgaaggacttgaaggatgggggcgcttgtgtggtctagaactgtttctcaaacttctggaagccattgacggggtttgcagaagttacaaaaccccattgatgaattagtaagattcagctataccaagcccatgaagctctaatttcagtctggcggttctacattatatcagctaatcatgtttccctccctaccctgcttttcttttttacttagtgcaattgagagctgtgtttttagtgctacacttcatgccttttcttcctttcctatttctttagctggactcttctaagctggtagttgagttcatttgactttcttgttaatagatttgagagatgctttccaaacaacctttcagtttctaagtcttgagaatatcatttactgtgcaagcatggtttgcgttgtactgggtcagttaaacgtaacaccttttgtgcttgttttaggatcctgatggtgaacatgccaggagagcaatgcaaaaggtgatggctacgactggtgggatgggtatgggaccaggtggcccaggaatgattactatcccacccagtatcctaaataatcccaacatcccaaatgagattatccatgcattacaggctggaagacttggaagcacagtatttgtagcaaatgtaagtaaacagaaccatcgtctaaagtagaaaatcagaactttatgaaatgaccttgtcaatatgttataaaagtaattctcacatttgagaagaaaaatgtaaagaagggttttgttcttgatttctttaaaaatcagccttataggcgggctttgtctgcattcctaagtcacaggcttgaccgtggtctcgttggggctgtgattcctgagtttcgcaggtgtttccgcaagcagtaaccgagtctgcattctccgttggtttattttatgcagttttggtgcagagtaagactgtacgagcagaagtgcactgacaccttcctcttgttgtgtctggggtgaatgataatacctccaccatctgcaaggggaaatatttttagaataaagtaggttgggtggggtggggagtggtaaagcttatcagggaaacaattttttaaaaatgttcagaaaatgagtattaatttgaagtatgaggtgacttaagtttctgagaaaagagacaatatatttactataggtacagtttatttacagtgaaggccaggctttataatcctattttaaaatttccattgcagttgattagtttttgtgacattatttcctaatacttttttccaaccaaagcatgtatcattcatgtagtaaaaatgttgtgtttcttaagatgtttacattgaggtttttaccccgttctctctcgattagctggattataaagttggctggaagaaactgaaggaagtatttagtatggctggtgtggtggtccgagcagacattcttgaagataaagatggaaaaagtcgtggaataggcactgttacttttgaacagtccattgaagctgtgcaagctatatgtatccttctgcaggaattcaacttatgaacagtttgacctaaattgctgtgttagtaatgtaggtttgtgtgaggaagaggtgactgtgtgtattcatgttttttatgtgactagggggagtgcattactgtggaattaagaggttctctgggccggaccggtcacggtggctcacgcctgtaatcccagcacttcgggaggccaaggcgggcggatcacttgaggtcagttcgagaccagcctggccaacatggtgaaaccccggctctactaaaaaatgcaaaaattagctgggcgcagtggtgggtgcctgtaatcccagctactcgggaggctgaggcacaagaatcgcttgaacccgggaggtggaggttgcagtgagccgagattgcgccactgcacaccaccagcctgggtgatagagtgagactcagtctcaaaaaaaaaaaaaaaaaaaaaaaaggttctctgggggtggaattgattcaatacagtgtggatagaggggatggttacaacatgggcatatgcccatgagtctttctactgttttcttttcagaagagtctaggtttgaaggaggaagtccaaagaatgtgctactagagagaaagtggggttgttgtttcatgtgtaatacatccttataggacctcactctttccagtgagtagacatcattttggaagaggccacttctccttgaccctaggcttagcctagagtttttaatcccttggagagtaccccacaggagcacattcatacaactcagacaagaccgtcactgcatgtcttacccagaaaacatggtccttcagtttagatagtggtagatgcctggcccattggtcacattcagagaaccttgatgccactgcttaagaggatggtttggtgaaattgtaaggttacgaatgaagcttcacacctaaggaataagcggaagttgtcttgtcctccccgccagctttatttattgttccttttatgtttattgttgaaagtataatgaagaattgaaattgctcataaattcatcacttagagggactggtagcagttggagtatttttctttctttttgtatttctcttgtgcacatttttagaattgcaagaaatagccttaattgtaataccagctatgttcaatggccagctgctatttgatagaccaatgcacgtcaagatggtaagtcagtaggatctttctctgtgatatactcaagtctagcaaaaacatggaattaataagagtgtacatatagccactatgaaatatttgtggattagtctaagttaaatagggtgcagtatgttgagcaaaattgtgagagaaataacattttgctggtcaggcgtggtggttcacgcctgtaatcccagcactttgggagtctgaggcaggcggatcatgaggtcagcagttcgacaccagcctgaccaacgtggtggaactcctccgtctctactaaaaatacaaaaattagccgggcgtggtggcacgcgcctgtagtccagctactcgggaggctgaggcaggagaatcacttgaacgtgggaggcagaggctgcagtgagccgagatcgtgccactgcactccagcctgggcaacagagtgagactctgtctcaagaaaaaaaaagaagaaaaaaaaacattttgctcatggcagctcttgactgcattagatatttttccttttgcacagttgactgttcatggcgcattcaggaagtcacctgggtatcctggttgagcaagtgatccgtttcaaagaatggttatatatgtggggttccagtttttcaaagtattacagtataatgtttggttagcatcaaatctgttgtgaacataattaagtcattgattcagacagcttttaaaggtctgttggagcacttcaatcttaataaacatttgctctgccgtaactgtgccaaagataataattactacaggcatgactggaacatgctgagggcagtctagttgggactcaaattcaggaaaaagataaactataaagcaattttttcattactctaaatagagtaggtaagttttttgaatagatgatagattcacgtgactcaaaagtcaaaaggcatgaaaaggtagtgtgaagatagtgtgagtcctacttggacttcttgcccaggtccccatcatcccccacaataatatccatgtgtcttttcccttgacataaaataggaagcatgctccgcatgcctttctacccttgcgtattactccatggcgtggataatgtgtttagctggtcctctcttgatggggggccatttcagtcttttgctgttgcaaacactgctgcactggatactgagatttgtttgttttctttctctttcaggatgagagggccttaccaaaaggagatttcttccctcctgagcgtccacaacaacttccccgtaagtgtttcagtgattagggctgagagtttgaattggagttacactaataaacagaaaattaccatatggtttcacttgaacctgtgccaggttagccctcagttctcttggccagttcttttctatagatttttcagggtgagaaatgagcagagattcacaacttgaggatattgttaggattacctcatggtaatcctaggattgtaataccaggatgtagaggatgtggttaggcattttgaaagtgtcctggggaaggaagaatcagaacctgtgaagggaatgaaaaccaggctgcactctaattcagaagatactggttagtcccatgtgggctagcagtgcacactagacatctgcacagaaattcgcacgcagatgtttgcagcaggatgaaagacacatgctgcagtgtggatgaacctcgatttcatctacaggaaatgctccgcatagataaatgcataaaggcagaaagtagattagtggttgcctgaggccgggaaggagtaagtagggacgggactgctaataaggttggatttcttttttgggtgatgaaaatgttctggaattaaatggtagtgatagttgcatatctctgaatatactaaaaaccaccgaatactttgagttttatggtatgtgaagtgtcttgaacaaataatttgtatgcagaggggaaagggatcagctatttgtgacacccaggtgaaaatctgtctcgtgacagggaaggctagttgatgggctaccacataggtagaagtggcaaatattagtgcagagtcatagataagccagaggctggaagcaagaacctcagtgcatacagcggtgggacgactcagggaatcactggcgcaggtaaagctctcctggagaagaaagatggatgagggtgagaggcctgtgtgtgctgtgctggggtgacctccaccaggcgggttgagggggcctggtctggagcagcagctcaagctcagggccctactcactgagttggatgggagcccaggccagagcacctttgcagcgtagcattatggcagcatgacagatgtatcttgaagggaaatctgtggcttcatgagaaggctcatctgttgaaaggcaacattagttagagaaggattgcatttcctggacataacatactcatttcccaaataaattgtcagtgtgctcacctgagcagtggtcaccctggaccatggcgatggctcttgttgactcttgtgctggagcaggaggaggagcacactgctccagggagcctgttatccatggctcttggtctcccggccatttcggaggcttgacttcaaagccttcagtgctttgggagagtaagtcaccgtggcgatctcttgctgctgttgctatgcaattaaagatggaatgttcatcagatgaaacgcctgggaagtggtggcaggttttatttactttttaaatgaactttgtttgctttctttccttcctttcttcctttttctttctttttgatggagtctcgctctgtcgcccaggctggagtgcagtggtgcggtcttggcttgctgcaacctccatttcctgggttctagtgattctcctgtcagccttccaagtagcagcgattacaggcatgtgccaccatgccaggctaatttttttttttttttagtagagatggggttttgccatgttggccaggatggtctcgaactcctgacctcacgtgatccacccgccttggcctcccaaagtgctgggatttcaggcgtgagccactgcgcctgcccttgttacgatttttaaaagcttacctggttgtagtttaagcctcagatggtggttaccccagatattgcaagtgtcagctcttttggctgtttccagagaccagcctgtatttctgtgtccctgtctgtgttggtagggcatggagttgagtgtgggctgggtatccagttgtgggttgggaagctttgggggaaggaagataggttctttgaatacatacattagcttcattgttactaaaaccacccagattcagagagtagtggacacccaggatgttgattggctggtttgtaacgtgttttttcatgagaaacatcctttgggctactagggattgggcacatttgtgctgcttgccacctgatgtcttgagtcaccttttttgatcagacagttctcagtccatgggttagtgaaacaaataggctctcaagaatcttagtgtgggggttgttaactttcccgtgttggttttcagccgcctttgttgtatacacacatatcccaaacgccggaacaaggctctgtttccaagtgtgccgatgttgaattttgcattgggccctgaggtcactggtgggtgggggtgggtaggctgaagtggatagctgcaactcactaaacactcttttcctttgagggtcaaggtttgctaaataggggaaaactaagcttctttctcttttctttccagatggccttggtggtattggcatggggttaggaccaggagggcaacccattgatgccaatcacctgaataaaggcatcggaatgggaaacataggtcccgcaggtgagaatgacagtgcaccttgcttggtggtttggggaagtgaaaattattaattattgggacaactggactttgagtagtttaaatggaataaatatttaactgggacaaaattccctccttattcatctctgcctcattttgaataaaggcagtattttgtatttttatcaagttgagtcattttttaaaaagtcattatgctttttcattgtaacctgacaacaaccttctaagctgaaatagttgtgccatttgataagaggaggcaagccagagagttgatcttgctcaaggtcacactgtcagttactgacaggctgcaggtctcctgaccacgggaccatagcactgccgcagtgccctgaaaagtgtcttaccaagacccctttgggccctcctggtgtttgcacagctgctgctagagagctaggggcattgatagatgcaaaaaaggtggagaggccaggcacggtggctcacgcctgtaatcccagcactttgggaggccgaggtgggcggatcacaaggtcaggagtttgagaccatcctggccaacatggtgaaaccccatctctactaaaaataaaacaattagccgggcgtggtggcgcacgcctgtaatcccagttactcaagaggctgaggcaggagaattgcttgaacccgggaggcggaggttgcagtgagctgagatcacatgactgcacttcagcctggcaacagagcgagagtccgtctccagaaaaaaaaaaaaaaaaaaaacctgcatgaaagctttgatgtgtagaataaactcaggctttgctgtttagcattttcattgctgtgtaatgatgtattttgattctattaaggaatatgtcatttttatgaccttagactttggtctttgttggaatcctttgaaattggaatatggaagcccctctatcccaccattgtcagtgttgcatatccctagactctcttccagagtcaccctggggctgacttaaattctgggccacaacttcaaatggctgttaacgtttcccccgacccaaaacacacacaccccatgtctgacatctaaacagaaagactgggggttggggaggaagtcttggtgtttttaggaactggtttttattttgaagattttacctttaacagggattgatttattgagacggaattttgctcttgttgcccaggctggagtgcagtggctcaatctcagcttaccgcactcaatctctgcctcctgggttcaagtgattctcctgcctcagcctcccaagtagctgggattacaggcatgtgccaccacacccagctaattttttgtatttagtagagacagggtttcaccatgttggtcaggccgggctggaactcctgacctcaggtgatccacccgcctcggcttcctgaagtgctgggattacaggcgtgagtcaccacgcccacccttaacagggattcttaaaaaaaatctacttctgttccctaaaattttctaaaaagtttatgttccatagaatgtgtcttataattctatttcatgtttaatactgcctaacttgaggcctggtgtggtggcttatgcctgtaatcccagcaatttggaggccgagggtttgagactagtctaggcgacatagactccatctctacaaaatataaaaaaaatcagccaggtgtggtggcgtagtcccagctacttgggaggctgaggcaagaggatcacttgagcctgggatgttgaggctgtagggagctgtgaccatgccactgcattccagccccagtgacagaaggagaccctgtctcaaaaacaaaaaaaacacaaaaaccctgcccgactgggtcattaaagtatgtagatccctcagaaaaagattagccaggcgtggtagcaggcgcctgtaatctcagctagtcgggaggctgaggcaggagaattgcttgaacccgggaggtggaggttgcagtgagccaagattgtgccattgcattccagcctgggtgacagagcaatactgtgtttaaaaaaaaaaaaaatagctatatgatatttgacagttgaaatggtaagggctttttttcttgctgattaaaatatataaaatatacttgtcatcagggattttcttttgagttcttttgctggtttggaattatgctttttaagttcaaacgttatttactgctttgacataattttagtttgcattgactttttctttttaaggaatgggaatggaaggcataggatttggaataaataaaatgggaggtaagaaatttaaaatgaagtacaagcataatcacttttaggcatagttttctctctttcctcttttctttcttgtttaaaccctgcatgaaattctctttggtttcagtttgagtctagaaatgacttcctcctgcctgtccatccttccagcgggtgtcttggcttttggttctggctgtctcactaactagctctgtgaccttgggcagaccactccatctctatgcctctttttgcttgtctattcattgagggggttggatcagaccagctttttgaagatgggtgatttttaaacaagggtgctagcattttttttgtttttcaaaagcctttaaacttggtaagttcttggcagaagataccccagttgaaacatgtgatagaatttttctttccctgcttagtctaagcagtcttgttggatgatgctgaaatgtgaacctctcttgcaggaatggaggggccctttggtggtggtatggaaaacatgggtcgatttggatctgggatgaacatgggcaggataaatggtaagcatcgtgttttcttcctgctttcactcaccctttgccggctgttgcctctcaggtgacttttaggctgcagacccactgaataagtggtttctcacttctgcttttcaaccgaatcaaatgtcttttgaattgccttaaatatttcaaaaactagacataatagtagacttacttcacttggtcgctagtcttttgagatgtcctgtgttcccaagctctgcagtaattttcgagtacagtgttaaaaagcatgtacacgttcgtggttatggtctccgagtatgagggattctttaaagtttgtaatcaagtttgtctctgggagtgctgcaaagggttgttcttggtcatctgccccagctacaagttgtctatagaggcgttaataaaaatcacaggctcttttaatttagcatttacataatgcaaattctggtttagtataattcaaatcctccaccaacttttttttttttttttttgagacagggtctcactctgtcacctaggctggagtgcaatggtgcgatcttggctcactgcaacctccgcctcccaggttcaagtgattctcctgccccagcctcctgagtagctggtattacaggtgtgtgccaccatgcctggataatttttatatgtttagtagagtcggagtttcaccatgttggccaggctggcctcgaactcctgacttcatgtgatccgcccgcctcagcctcccaaagtgctgggattacaggcgtgagccaccgtgctcggcacctgcccccaactttttagcagaaatataataatataataacaatgtagtatttcatttagtccttgtgagaaccacatgatatgtacatactgctatccttgtttcatctgaaactgaggcacagagagtgacatgcctaggtcaagtgactggtaaacagtggtgcctgcatgtgaacccaggctgtctggctccagagcctggcacttcatcatgtgggaatcctgccttttagaagtgcctccagcacagcacttggcccagggcaccagcagggctgtagagtgtgcatgagaaattgtaaattttcctttttgaaatcctttatgtgttggtgactctttgaccttccccttcactgcaggaaagctgctgcttttttacacagaaactttcttggactgagaagtcattagggatttaggtataaaccttcctttgcgggtctgccataacaaaggatgtgaaaatggtacaaggacagacatcattgtcaggcttgaaaggcggctgtccctgatgatcaggcccttcttccggtgcacagggagcagtggggcatgatgtgtgttgccctcttcatgggtgccttgttctagaagctggtaaaaggatgtaggaaagttgtcaccattagtaataaagcaacagaggtctgcgtttccagtgtacattcaagcttgcctgtaacttgtgtgtgcatgggattttaatttttaaaaaaagtttcagaaatctggcttggtaaaatgttactcagagcagattagtctgggtgtgctggctcacgcctgtaatcccaacactttgggaggctggggtaagaggattgcttgagctcaggagttcaagatcagcctaggcaacactgcgaaaccccatctctctcttttttttttttttttttttttttaagaacagattagtcattagggaatttgagttgttgctgtgaggagtagagtgatgcagtttagaagtagatggaaatcaggatgggttggcctgggagctgtgctgagccgtgtgacacagtcgatggtgaactggcaggtgtaatctcgcagtcaggattcagagcctggggtacgcggtggcaaaggattccaagtgctgattctctggagaaccacaaatggagtgtgttttcctagactgttcttagatgttctgagatacggcactcggagtgctccccacaccctctacagctgagaacagggactccttcccacttgaccagcattctttggtttgggtgggatgagctctagagcccttgggcactgcaaggaaactgtacatcacactggaggaagaattgaagcagacgtttgggtttaatgaaatgttaattcatgactagagtgtagccattatggtcatgggtgctcccatcagactgctggtcatgcaggttcccaggacccacactcagcatgagtcaaatcttgatagagtggctataaaaatgtaaatcaaaagattgttaaatgtcggccaggcgcggtggctcacacctgtaatcccagcgcattgagattaatgttaaaaaaaaaaaaagagagattgttaaatgtcaaaaactgactgtagtgaggcagtgtttgacagtgaaaatgctaccctttgtgggtgtaaattggagttcacggtgctccctgagctctggggccctgttgacagccagtaagatgagttatgaggtccttgccaacatgctgatgccagcctgtggcatgcttgtctggagtggggtgctgccttcttgcagacaggtggcaggatggaaggagagcagcagaactccatgaggatgccgctgcggggctgcagggttctgtccctgccgccgtcccccccaccctcccaccaccaccgactcctgggctctgctatccagcagatagcacccatgaggagcatgctgacccatgaggtcacttgggttaattcaaactaggaatgttaagcccaccattggcagccagtccttgttaattcataatgtgctgctgctgccacatctctaatggaattgcttattttattgaaagatagggactctggctgtataatgcaaggtgttcattacatcgcacctatcttacctgacatttctaaggagtgagatgattaataactagattcttcaaggccctctcagcatgggagggagagattcttcaaggacctcgcagcatgaaaagtgtgatccccatttcagcctgcgtgagatggatgcacaaggaaagaagtggccagcagtaggaatcacgaaaggcttatcaagcaagtgaccactgtggtgggcctttcccggcagaagctaggacctttgttttaaaagacattgtaaggctgggtgtagtggctcacacctgttatcccaacactttgggaggctgaggcaggaggatcacttgagctcaggagttcaagaccagccagggcaacatagtgagacctcctctctacaaaaaataaaattagccgggcatgatgccgtacacctgtgctagctgcctgggaaactcaggtgggaggatgacttgagcccaggaggtcgaggctgcagtgaagcatgatcacgccactgcattccagcttgggagcttgggttgacagagtgaaaccctgtctcaaaaaaaaaaaaaaaaaaaaaaaaaaaaaaaaagaaccttacaaaatatgagaaagttgtgacccaaaccccgttatgtagatgcagccactgcagttgtcagcagagaggtctttctgtgcagacatacgtctcgccatgcacacgcatttctgtgttagggcacaggcttctgtattagaggatgggcttctgcactggatttgagtcccagcctttgcctcacctctcaccagcatgtgaccttggtcaagttactaaattgtgtgagcctcaatttctttttaaagtggtagtggtggtggagggtaacaggcgtgcgtggcatggttgtgaagagttgatggaattatacacaaagcctttggggtagggcatgtgttgagtgcctagtaggtgttaccttctgcagcctacgtttgatttagctgcactgcaggggacctcttggttactgtggtagcgaatgcttggtgtacccagtattgtggtttgtgtggctgtaatggaagttgttcattggtccttgatggacttatgttaggtaggttgttcagggattcagttgcagtgactttgttttttagggaatgaagaatgaataatggtttcctgcagaagagttaaacatgctgacttggtggtggctgtcgtgtgtatacattttgttttgtttttgatgtctcagacacagtggtattcctggaaaggcctagggtgatttttccacagagatggagcgtggcatgggtggaggacttgaaagagactttgccaggaaggagatggggatatctcgaagctttggagagcctcttggcagaggaatgagtaagaaggcccagtgggcctcagtggctggggtccgccctctggggtgcaggctgccagggtttacctgatgtccctgctctcttagagtcagctggttttttttaagcttttaaaaaagatgttgttttagacctaggtaaaaaatttaggtcttttagtgttttattgctatatcagtagcattatttgtctttaagtcttttcagatggctttttaaaaaattggcataaggttgtgcaggctgtgggaatggaaactgctgcgtgtacttgactttctggccccctaggcctggagagtgtttcatggccctctggctccctaggcctggagcgtgtttcaaagccctgctaattggggcaggagtttccttaccccagggtgctgtggtgtccagtccagttagcaggatggagtgagttgtgcacttgctgatgcctttgacagaggcatctagaccgactagagaggttttctaaagttggaaggtcttgagtatttaggcctatccgtatgcagagaaattattttttcagttttggttaggtggcagagcaatttcctcctcttttttctttctttcttttttttttttttttttttttttcaagacagagtctcgctttgttgcccaggctggagtgcaatggtgcgatctcagctcactgcggcctccacctcccggtttcaagtggttctcctgcttcagactcttgagtagctggcactgccgccaccacacccagctaattttcttgtatttttaatgagatagggtttcactgtgttggccaggctggtcttgagtcctgacctcaagtgatccacctgcctctgcctcccaaagtgctaggattacaggtgtgagccatcacgccaggtctgttgatgtccattttatgttagctgtattcttcaaatttatgaaggccctagaaaggtggtcattagattcatccttcagctcatcagaggggcaagattcttttttaatacagtctctccctgtcatctgggctggagtacagtgggtatgatctcactgtagcaggctgaagcaatcctcctacctttgcctctgagtggctaggaacacaggcacatgccaccatgcccagctaatttatttttttgtagagacagagtgtatgttgcccaggcttattacaaattcctgggctcaagtgatcctcccgccttggcctcccaaggtgctggggttataggcaacagccactatgcctggccagcggtgtatttaaaaaaaaaaaaaaaaattttttttttttttttttttgcgacagagtctcgctctattgcccaggctggagtgcagtggcacaatcttggctcactgaaagctctgcccctccaggtttaagctgttctctgcctcagcctccagagtagctgggattacaggcgcgtgcccccatgtccggctaattttttgtatttttgtagagatggggtttcaccatcttggccaggctggtcttgaactcgggacctcgtgattcacacgcctcggcctcccaaagtgctgggattacaggcatgagccaccgcacccggccaaagaaatattttaaaacttactggccgggcgcggtggctcatgcctgtattcccagcactttgggaggccgaggctggtgaatcacgaggttaggagttcaagaccagcctggccaatgtggtgaaaccccgtctctactaaaaatacaaaaattagccgggcatggtggcgggtgcctgtaatcccagctacttgggaggcggaggttgcagtgagccgaggtcaaaccactgcactccagcctgggtgacagagtgagactccatctcaaaaaaaaaaaaaaaaattaaaacttactgtcatttgcctgcaaatactaatttgtggatagctatggcaagaatagatggcatgtggctgggcaggtggattacaaggttaggagtttgagaccagcctggccaacatggtgaaaccccgtctctactacaaacacaaaaaatttagccgggcgtggtggtgcatgctgtaatcccagctattcaggtggctgaggcagaattgcttgaacctgggaggtagaggttgcagtgagccgagatgacaccactgcactctagcctgggcgacagagtgagactctgtctcaaaattaaaaaaaaaaaaaaggcatctttacttctgtaggaactttttcttgctaagagccttcagcttcttgccactctgcagcacctctcgcctaattccgctttttggagtggcacatgagtggcacagagaggtggatgtgggcttcttgcctttgaggtcacttcatgtggccacaggaaactgttcctgtcctgaccggcagggcgccacctctcccgctgcggttacaccttctttctgattgggactgtgcgatctctgtcccggaattccctcctgccgctgtgatcagacctacatgagtaaggtgatctcgtcaggttctcagagtggttgggttggtttttcaagattcaattcttgacctctttcccgtgtcctttgccatgagaggtgaaccattgtggtgctcctttccatagtgctttcctactcggtgccccttcctgtgcctaggcagtagatctttgcactcctttgtgcaaacagctgtacttgctgcttcaaaaatttggataggcctgtggtctttggccttcaaggatgaggtgtagctgaggcgatactaagggtggcttgggacatcgccagaggtctgtgcatccaagtggcctagtgaggacgctggtggagacgttggttgccagatgctgctcagggcattggctctgctagggggctcagcaggcttggcacaggcagcaggtgtgcgcagatagagcggctggcggcggtgggtgcaggtctctgtgaggcaggggaggagcatgggcagaacaggctccagttgtggtctgtggggaggcctgtgaatgccgatgggagaattccgccattctctgcaaatcagtggcatgttggttgaaagcttttgcagctgtcttgcaggtgtgttagttggaagcttgatctagttcaggggtgtgcacgggagaatatagtcatgggttctcagttggtttctgtttgggtcagtaaagccccttatccctcttttccacttattactagagacagaaacttaaaaaccatggtttcaggctgccaaaaagcctaaaacagaacaaagcaaagtaagacgtgttggacaagcttggtctaggtgctggaaagccagcctcggctcaggcatgccgggcaggatcgcaggcgtcccgggagaatgagctgtacctgctggtagactgaagtctgtgtctcttggtgaactttcccaccttgtcccacagcagttagttgggatataagaagcagctgtgtggggtgcaggtgcttttgttgttgttgttgtttggtgtctttttttttttttttttttttcttagagacagagtctcactcttgcccaggctggggtgcagtggcacgatctcggctcactgcaacctctgcctccagggttcaagcgattctcccgcctcagcctcctgagtaactgggattacaggcacctgccatcatacccggctaatttttagtagagacggggtttcaccatgttggccaggctgatcctgacctcaggtgatccacccgccttggcctcccaaagtgctgggattacaggcatgagctactgcgcggccgggggacaggttttaatggctttgtggccgtggtcataaagcgaaatgtgcctcgtggctaatgtccaagttgctgagcatatactttgagaccagagcgggtgggtacaagtgtcttctacatagcaaaagatggaccagaagcttggaaaggtaatgctatgatagcatcagacaaaccttaaagaggtgtgggtgcaccgtgggcaagtgagcagcagcactgtgtttgggatacttggtggggggtgcaatttaggtattttcctgaaaccttatctgttgcctagtcacagcacacccagctcatttcaggcaaggctggcatgctcaaggatttccgcgcagagctcatttgttagcgttgaggttgtccgtggagctgcagctttaatttgctctatgataatgagaggtgcctctgggtggataaatgtgggctccaagtgggtgatgctgggcggtcttctgaacaagaagttggctggggtgggggtgggggcttactttccagctcaggggaggcaaggaagcctcagtcctgagagcctggaccagctttagaaaactgccgctgagcgagacccgatggccctcttcttgctctggctctcagttcatgaatgcatatgactcctatctctgctgggcgcattcgcaggtgaccccgcacgctgggcctcagactctggagctacgtggggtcttggcatcgtgacccagcatcaaggactctcctagttctctgtaaaatgatcttgtctgtgcgtgtgtttctcaaacccctttccctttatcttgtcatttttattagtagtatttctactctggaatctgtaatgagcacatttctattgccatagaggaatttggctaatttttttttcttcctgatttccttagaaatcctaagtaatgcactgaagagaggagagatcattgcaaagcagggaggaggtaggaaccgcttagtttgatgttttgtttttttagaacaggctgttatcgctggggactgtagagcttagtggtgagaagtgcgggttctgacacagactgcccggggtgggagcagctctgcctttttctagctgtgtgacgtttggcaagtcactgaacctctctgtttctcatagcactcatttgtaaaatgggggtgtaatagtacctgcctcagggatgctgtggagagtgaatgcatgtgaaagagtgcttccgcacgtgctgtgcacaggccgaccatcttcattgttagagtacctctcttttgggggttttgttttccacattataaattcctaaaagtaaatatattttccttagacttgatgataagactgaaagcacaccacccaacaagtaataaatgcttgtaaaatagataaatgtactcattaggaaaatatgaagaaagtatggtctgaaaccccatcgcccagtgatgactgccggaaacattttgttctgaatctttcattcatacacagctttatggatactgagaacaaaatgtactttttgagcatttttggagacagtctcgctctgtctcccaggctggagtgccgtggtgcagtctctgctcactgcggcctcaacttcccaggcctaagcgattctcccactttagcctcccaagtagctgggactacaggcgtgtgccacctggtttggctaattttttgattttttttgtagagatggcattttgacatgttacccaggcttatctcaaactcctggcctcaagtgacctgcatacctccagagtgctgggatgacagatgtgagccaccacacctggcccaaatgtactttttcagcctgattttccctctgagtatcttggcatctcacctcctgacttctgtgttgggctggctctggagctccacgctggtaccatttcctcccatttctttttttttttttttttttgagagacggagtctcactctgtcgcccaggctagagtgcagtggcacgatctcggctcactgtgacctccgtctcctgggttcaagcgattctcctgcctcagcctcccaagtagctgggactacgggcgcacgccaccatacccagctaatttttgcaattttagtagagatggggtttcaccatgttggccaggctggtcgcgaactcctgaccttgttccgcccgccttggcctcccaaagtactgggattacaggcatgagccaccacacccagctgccccacctcatttctgatgcctttgggcaaagtgcccattctcgctaggttccttatactgtggggaagttctgagacgtctcccctctgaaagtcacacattcttagagtcgggcctgctttggccgctcactgtgtgctgtgcagctagagaagcaggcgcggtgtggccagttacagagccagttagagaaactgcccagtttcctcttgaattggtatctttgactaggctgcttgggtcggtcacaggctggctctgggctgatggccactctcagaggcaagcgacagggtttcggggaggagccccaaactcggcatgtggaaaggggtggccttgctgacggagccagaccctgctttccagagttgcaagcaccacgggtgggggcgtcccttcgttctgctgactgacccccagccgctaccagagcccactctgcagtgccatcaacatcttctttccaaagccagcaagtcatttggtttccctgacaatagggtccccaaaagtggccagctgtgtgcatttgtacacagaggatctctcggtgtgtgtttttttgacctctgcttgatggtgtggccgaaaatcctttctctgtgccctgggagcgctgaggaaatgcagccagagtggcccccagcagagcatcctagagggacaggctgggaggggaaggtgggagtgactccgacttgtctccacataactcctgttcattaccctgggtggccccccgagtggggggtgtccatgcctccccctggagcatttctcagtgtctgctgatggagaaacctcagatgtctcaggaattgacgtccatggttcacaaagcttgtcacagacactagcacctcacagacacacatacaggggtgttctttagaagttgtgttatggaaatctcagctgtggcatagagcagagagaatgctgggaggcccccatgtgcccaccacacagctgtagctgttgtcaacatttgaggggtgtcttaatggtaaattatggtgggcctttacccctgatccatgcccatgagctgaagtggtctggcgtgttgtgcacacgcacactcaagttcttgacacccacctgtgttttgtgtccctgtttcaggtggaggtggaggaagcgtccctgggatcgagaggatgggtcctggcattgaccgcctcgggggtgccggcatggagcgcatgggcgcgggcctgggccacggcatggatcgcgtgggctccgagatcgagcgcatgggcctggtcatggaccgcatgggctccgtggagcgcatgggctccggcattgagcgcatgggcccgctgggcctcgaccacatggcctccagcattgagcgcatgggccagaccatggagcgcattggctctggcgtggagcgcatgggtgccggcatgggcttcggccttgagcgcatggccgctcccatcgaccgtgtgggccagaccattgagcgcatgggctctggcgtggagcgcatgggccctgccatcgagcgcatgggcctgagcatggagcgcatggtgcccgcaggtatgggagctggcctggagcgcatgggccccgtgatggatcgcatggccaccggcctggagcgcatgggcgccaacaatctggagcggatgggcctggagcgcatgggcgccaacagcctcgagcgcatgggcctggagcgcatgggtgccaacagcctcgagcgcatgggccctgccatgggcccggccctgggcgctggcattgagcgcatgggcctggccatgggtggcggtggcggtgccagctttgaccgtgccatcgagatggagcgtggcaacttcggaggaagcttcgcaggttcctttggtggagctggaggccatgctcctggggtggccaggaaggcctgccagatatttgtgagaaatgtaagtggctcttggggaacttcttggtggtggtgagcatgaggggacaggggaggcaaagatcagcaggatgaagtcagaggtggcgcccttcaaaggggaccacacctccttgccactgtcccaaacgttttatgctagtgggacaagtaaggaatgtgagaactgtgggttctggaagagcctgggcttctccactgtgctagaatatggagcagacgctgagctcagagactccagtttctgattggttggcttgaagaggcactatgtgttgcacgatggtccagggaaagaagtggctgtaacggaattattttccccagctcagccacccttagccactatttagtgactgtgggctgcgcaccgcaggcctgagtgtcccatcctgcacggtgctcccacaggcagagccccagggagggagctggctgtgccgcttcacagccttgtcccacatgtatctattagtttcctgctgatcgcctcagtctgaagggcagccagcttctcggtatagtgagaaatctagcatggccctcagagccagctgcaaggcatgccttaggatttggtttaatcacgcatcagtctcccttttcttctccccttcagctgccattcgatttcacatggaagatgctaaaggacaaattcaacgagtgcggtaagtgttgggaacggctttgtaggtgcttccctcgtgcttgttggtgacgcagccgagtcagcagcaaaacctccctcccagccccctccgtcggctcaggacccatggccttgccatgttctgcccacgccaatgctcaggcaggttgttgagtgtcctgtgatgtgtcacatgtttttcagctgtgttctcatttcatccttacttccttttttctttttgagtctttgaaacaaggtagtagtgtccccatttcacagatgagtcaggcagagtcttccttctgaggttacctggcttctaggtggcaaggctaaataaatacatcccagacgaggtcgctttcccctcagcacagctggtgtggggcctcggagagaacacagcccagcaggtgccatggggaggcggtgcaggctctgggcacacagcagctcctgtgagggtgaggctaaggtcttgtggtttcctggcacatcgggcaactcttctggagggctctgtctgtggctgaaagcaagttgtcttccttccctgccctccagggtgagcccccaccccgcatgcaccacctctgttctttttagctagaggggcctgagctagaggtctgggcagctgcttccgcactgtcctcccgcttcctgtttcagcagtggctccgatttcaccaccattgctgcttctccatggttcttggggcaagccgttgagtcatgatctgcctctttgctccattcttcacctctttccccactcctgagttcccatgttgtagctagatattctgaaaaggccagtgggatcacagcgcccccagcccccacttttgcaatgcctggagcggccctgtgccttcaagaggaagtccagactcacaagccccttgaagacctggtcctatcctcctccatctccctcctgtcccagaacctgagcggcaagtgctgcacgtgtcccgcaatgctctcgtgtgagccaattactggcaagtcttctttctggtgaatttctgtgtaagctcactcagaacttgcccctgaggacccctccaccctacctgccctgggccctctcttaggcactgagttcccacctctggcattgtggccctaccacctttggtactcctggagtagagcctttgccctctagggctctgtccacggcgttgacacatatctggatgcttaacgggtgctcaaatgaataagtgaaacctgctggctttcatttggacagtacagacgtgtccattggattgcggatggctttgtaaccaggggcggtggcatatcaaaaatgaagactttgtaaaatgtatgggaactttctgcctataaagctggctttacactgcgccttcttttttgaacttcctgaagcgtaaaggcgtgcattgaatccgccaggaaggcttttcatggggcaggggcaggctctgttagcagaagaatggcagtgtggctgagggggccgtagtcattggttctcgccattgtattctgagcctttgtgctctaggcttcagggcctctcctttttgactctgtccaccaaaatctaacaaaatcgggactgagtgtcgtctcttcttccctccctgtcctaggccacgtgctgtacgccgacatcaagatggagaatgggaagtccaaggggtgtggcgtggttaagttcgagtcgccagaggtggccgagagagcctgccggatgatgaatggcatgaagctgagtggccgagagattgacgttcgaattgatagaaacgcttaagcagttgccttttttaaacatcgatacgagacctctgaatttgtattttttcttgttaaccattttaatttgttggctggatgtataaagatgtttaaaaaattcagttgctttttggggtaatttgaattacttttttaatgactggggttccatttgactgtttgcattgagattgcaatgtgcgcaattttttttgtagttgtggcatcttgttgacatcgaatatgactttgataataaataccggttcctgaaaacggcctgcttgtgtgtgctgtgtgggcaaccacgcgaggtgtggggagctggggtcactcgagcttccagtccaagcagcagggatctcatcccctctcttgcttgtctgaggccccaggggtgggtgcctgcccacagatggggggagactcttccctggaaactgccttcctgtgggctgtaatcccccggcttacaatggagcgtttggctgtttagagccttctgaggccaggcgcggtggttcatggctgtagtcccagctactcaggaggctgaggcaggagaatcactcgaacccaggaggcggaggttgcagtgagtgagatcgcgccactgcactccagcctgggcaacagagcaagactccgtctcaaaaaaaaaaaaaaaaaagccccccgaaagccatcctgtctccctgttgtgaagttaacgccctggggcacaggccctgcctgagtcaggcttgttctctggctttttttttttcctgctgaaacagaccaaactgtgtgccaccttccatgcgtgttcagtcctgccagaggctcaggccaaatctgattgatacctgggctctgtcagaattgggtataggccccaccccttcccccagtgaagcgctctcaggatccactcaggccaagcaggtgtgcatacctggcaaggaggcctggctgctgctgttctgttggctgtggaggggcgcgtcctgcccggctgcctgcctggtagcacatgctgttctgatcacccggagccccccttgctcaccagcttcttgccacccttttctccccactggcttttatccctgaggggtgagaccatggcagggtgaccccagacacacccccttttgtgtttggtcagggggttcccgtgcctttgctccactgtgtgccaatcaggagggaaagaaaagacaagaagcagggactgctttaaactggggctttatgtggccaggtacaagcccaggcagctctgtgactttcccgcgccgggatccagggctcctgggtgagcgggcgctgggctggctggctgtcctggccccacgcctaccggtcttaccgtcccagggggagtggttggttttccaggggatctgccgaggaagcgtgacttccatggacccctctccccagaagcccaatagtgagcagcgcccccggggaatcgccagggtccctccagccctcccagagtgtccacgtaccgcagaagtcgacatcatcgtacacctccgtctccctggcagagcacagttgggtcagcaaggggcaccgtggcccattccccccaccctgcaccacacaccccgcactcccccaccacggtcagggctggcactcacaggggcaggagcgctgttctgggcacgtagccatctgtggagagagtgggcatggtgggttctgaggcccagggtggcggcggggacctcccggggctgcggggccgggcgcactcacatttgcctttggggtcccggcacagcatctcctcattgctggtgaactcgatcacctccaggatctccccgcgccggatcccgaggtgcttgccacccccgcgacgtgtcttagcgttggggtcgatcatcatcttcgtgtgaaccacgatctccccttcaaactggggcgcgagatgttagggcctctgcttgtgctgccgcccttgggcccctgtcttctttctgagcctgggatcggtgggaccctggtctccgccctgccaggactcctgcttagctcagaggcctcaccttgaacttcttccggaactccctctcggccttctctgccttcctcagctgcttcagcaactttgggtccatgggtggcaactgctgtggctggggatccttctccttcctgatagcccccaccaaggaattgtgtgctcgtgagcaagttgtgctcctctgggggttcctggagctcgccccccgtctgcccaccccctctgcccatggcacctgagcgctgggtcttgtggtggcctcctggcggcttgctgaactgagggcgcttcatctggggacagtcaggactccgagtcaaggcagggcccgccggctcagcctttaccctggtagctgttttttgtttgtttttgtgtttttgttttgagacgaagtcttgctctgtcacccaggctggagtgcaatggcacaatctcggctcactgcaaccttcgcctcctgggttcaagcgattctcctacctcaggctcccgagtagctgggattacaggtgtccatcaccacacctggctgatttttgtatttttaacacagacaggtttcaccatgtgggccaggctggtcttgaactcctgacctcaggcaatccactcgcctcggcctcctaaagtgctgggattacaggcgtgagccactgcgcctggcaggtggctggatcttgagtaaggcctccctgtgtcagttctgaggactccccaaatcccaccaggtcccctcccaaacctctccctgcccaccttcttccgcaagcctttctcaggggtcatgggttcttctggattgccttccattcccttaactcctgccacgtgctcagcatggtgggaactgctgggccacgcccctcatggcagccctctcagcaaccttgttcatgccagtagacgccactgtcatgcccaacttgtccacaaggaaataaaggctcagagaggtcaagcaaactgcccaaggtcacccagctggtaaatggtaaaggcaggatttatctgtaggcttcgaggccatttcacttctgcctcctagagcaagttgggtctagggttcttttttattttttgagacggagttttgctcttgttgcccaggctagagtgtgcaatggcgcgatctcagctcactgcaacctccacctcctgggttcaagcgattctcctccctcaacctcccaagtaggtgggattacaggcacatgccaccacacccggctaatttttttttttatttttagtagagacgggtttcaccatgttggccaggctggtctcaaactcctgacctcaggtgatccacccgcctcggcctcccaaagtgctgggattataggcgtgagccaccgtgcctagccgtttttttttttgtttcttttgtttttgtttttgtttttgagacggagtttcattcttgttgcccaggctggagtgcaatggcatgatctcagctcactgcaacctctgcctcctgggttcaagcgattctcctgcctcagcatcctgagtagctgggattataagcacccactgccacacccagctgatttttgtatttttagtacagatgaggtttcgtcatgttggccaggctggtctctaactcctgacctcaggtgatgcccctgcctcagcctcccaaagtgctgggattacaggcctgagccactgcacccggtaggttctggggttctactgtaatgagatttgggtgaaaaactaaggcagaagggaggatgaggagaggctggcccatgggtacaaagttacagttaggaagaagaaattgggtgttccattgcacaggagggcaatgatagttgacagtaaaatatcatggccaggcatggtggctcatgcctgtcatcccagcactttgggaggccaagtcgggcagatcacttgaggtcaggagtttgacagcagcctggccaacatggtgaaaccctgtctctactaaaaatacaaaaattagacgggtgtggtggtgggcgcccataatgccagctactcaggaggctgaggcaggagaatcgccggaacctgggagctggaggttgcagtgagtcaagatggcgccgctgcactccagcctgggcgacagaccaggaccctgtctcaaaatagtaaataaaaataatttttaaaagatgctgctagggtaagcgtcctggactggtgactgatgatgagactctggactgaggggtctcccatggtgccagtctccctgtgccacttcctggcaaatgaccaggctcccaagtcagagccctgctggccaaggaattggcttcaggtgggagccccaggaaccctggtgagtgaaagatccagaacccagagccccagcatgtcctttccgaatggctcaaagtatcccgccggacatttcaggcctgtagtccctccaagcagcccaaggagcagcacctgaatcgtgcccgccagataccaggcatggccatccacagtctcacctggaacacacagcccctccagctgctcctgcctctcagaggcttccctggccgtgagcagtcactccaccaggagcgaacctgaccttggcactccagggtccctgcaaacccgccacattagagcacctcttggcaccgccatgcaggcagccctggttcatccacagctgacccagagcaggcctctgcccgccttccccgcatggccagctcagatccctgggaaaggctgggctctccccacctgcagaggagccccctgccttccaggaacctctgcagtggagctgccactgctccaagtaaggcagacagtgggaaaggggagtccagagtcctggccccaagagacctaagctgcctttgagaagctgcacccacagtgagaagcccacgccactcctgagaagcgggagatccagggaagtgggacctttttttttttctttttttcttgagacagggtctcgttctgttgcccaggctggagtgcagaggtgcaatctcggctcattgcagcctccatctcctggattcaagcgatcctcccacctcagcctccccagaagctgggactacaggtgtgcaacaccatgtccaactaatttttgtatttttagtagagacggggtttcaccatgttggccaggctggtctcgaactcccaacctcaactgatccgcctgcctccacctcccaaagaactgggattttaggcatgagccaccgcgcccggccccttttttcttttttcctatcagaacctcaaatgactggcaaggaagggggagaaggttatttggtgacaggaacaatgggccaagggtggggactgtatgaagtttgaggagaggcagatgctcctagcctcggaagaggtgggggattccagcagggcttctgggagtggttggaggcaggctgtcactagcccaggcgctcagcagccccactcctggccatccgcatccccaacggtggcccccagacccaagccacagagcctcccctagagcggaagcagaaggggccccaccaggaagctgtgtgctcacagggaggtgttgcaagaagctcagggagaaagcccaggagaagcagagggggcctctctgccccaggccctctgaggctgtcagcgagagcaggagcaccttagaagctcaagctctggcccccgctgaaagccctgccacagatccagctcgtggaccagctgtgcaagccagggcaagccccatcccagagcctcaaccttgcgtacctatttttttttctttttttttttttgagatggagtctcactctgtcacccaggctggagtgcaatggcaggatctcagcttactgcaacccctgcctcccaggttcaagcgattctcctgcctcagcctcccaagtagctgggattacaggcgcctgctaccacacccagctaattttttgtatttttagtagagacaggttttcactatgttggccaggctggtcttgaactcttgacatcaggcaatccacccgccttggcctcccaaagtgctgggattacaggcgtgagccactgcgcctggccttttttttttttttcaactgagacagacacagagtctcactctgtcacccaggctggagtgcagcggcgcgatgtcagctcactgcaacctccacctcccgggttcaaggaattctcccacctcagccttccgaatagctgggatgacaggtgcatgccaccatgcccgactcatttttttttttgagattgagtctcactctgtcgcccaagctggagtccaatggcgtgatcttggctcactgcaacccttccttcccaggttcacgcgattctcctgcctcagcttctctagtagctgggactacaggcacgcaccaccacacctggcgaatttttgtatttttagtagagatggggtttctccatgttgttcaggctggtctcgaactcctgacctcaggtgatccacccgcctcggcctcccaaagtgctgggattacaggcgtgagccaccacgcccggccccagctagtttttttatttttagtagagatgggtttttgccatgcgggccaggctggtctggaactcctgacctcaagtgatccgcccaccggacctcccaaactgctgggatgacaggtgtgagctgccacgccgggccagccttgtgcatctgtaaaatgggggtgcattgccttactgccctgtggggatttgggagtggagggtacggatttagggacaggcaggcaaggtgcttgcctggaagctgcttgtgttttcatgaaggcattaactttggagtggagggtacggatttaaggacggatttaaggacagatttagggacatgcagggagtggagcgtacagatttagggacaggcaggcaaggtgcttccctggaagctgcttgtgttttcatgaaggcattaactttggagtggagggtacggatttaaggacagatttagggacatgcagggagtggagggtacagatttagggacaggcaggcaaggtgcttgcctggaagctgcttgtgttttcatgaaggcattaactgtggagctgggcaggaggtgcgggcctgctccctattcacccagcacaaacttctaagaaacctttggcagcctccctcccctgccactgccacacctgcctgcaggccacacctccccctgagtttcaggcccaagttctgcctggacatcccctcagctaccttgaacacaacaggtctaagtaaatcaggctgggcgtggtggctcacgcctgaaatctcagcactttggtaggctgaggtgggcggatcacgaggtcaggagttcaaggccagcctggccaatgtagtgaaaccccagctctactaaaaatacaaaaattaactaggcatggtggtgggcgcctgtaatcccagctacttgggaggctgaggcaggagaatcgcttgaatccaagaggcagaggttgcagtgagctgagatggcaccactacactccagcctgggcgataacagagcgagactgtgtctccaaaaaaataaaaaataaaaatataaggccgggcgcggtggctcatgactgtaatcccagcacttgtggaggctaaggtgggtggatcgtttgaggtcaggagcttgagaccagcctagccaacatggtgaaaccccatatctactaaaaatacaaaaagtagctgggcttggtggcacgtgcctgtaatcccagctactccagagggtgggacaggagaatcgcttgaacacggaaggcagaggttgcagttagccaagatcacggcactgcactccagtctgggcaacagagcgagcctccatctcaaacaaaaaaacgaatacataaataaataagggtcaggcgtggtggctcacgcctgtaatcccagcactttgggaggccaaggcaggtggatcacgaggtcaggagatcgagaccacggtgaaaccccatctctactaaaaatacaaaaaaattagctgggcgcggtggtgggtgcctgtagtcccagctactggggaggctgaggcaggagaatggcatgaacccgggaggcggagcttgcagtgagctgagattgctccactgcactacagcctgggtgacagagcgagactccatctcaaaaaataaataaataaatgaatggatggatggatggatggatgaatgaatggaacctaacatcttgtcgtcaacccaggggcggctctgtcatgcccttgggtgctaggcttgaaacttccctgctttatataccaccaaatcctgctttttttttttttttttttgagacagggtgtttgctgcccaggctggagtacagtggtggagtcacagcctcactgcagtctgcagtctcgacctcctggactcaagcaatcctcttgtctcagcatcccaaatagctgggactacagatgcttgtcacacctggctgatttttaagtttttttgtagagatgaggtctcgctctgtggcccagactggtctggaatcttgggcttacgggatcctcctgtcttggcctcacaaagccctgggattggctcaaacgatcctcctgcctcgggctcccaaagctctgggattacaggcatgagccactgcacccggcctgatgcctgcttttgattactgaattcacccactgctcccacatctcctgctgccaacctgggccacacctctgcctacaacagccttctcactggtccttcgcctctgggctccccttatgtagttccacccagcaggagccagcaggtcctaaaatgttacttgctcttacaccaggagcatggcagaaaatggccttgccccgaatgttttgcagggactcgggcaggccaccaacaaacctctgcccttggggctggggctggagtcatctctgggttccacatcgtcatacagctcgtagatctcatctgggaccctgcggggatacctgagatgaggcctcttctttttttttttttttttttttttttgagacggagtttttctctgttgcccaggctggagtggtgcaggggcatgatctcgggctcactgcagcctccacctcccgggttcaagcgattctcctgcctcagcctcccaagtagctgggattacaggtgccccccaccacaccgggctaatttttgtatttttagtagacggggtttcaccacgttggccaggctgttgtcgaactcctgacttcaggagatccgcccacttcagcctcccgaagttctgggagctccaggccgagatgaggcctctttgagccccacaatccgcacccacctccgcttcctccccacactcactgcgggatgtcttcaggctgtcggtcctggaagtggagcccagcggccgagcgggtcctccgtagatctgtggggtagagagtagggcagggaagccggcactgcctgggacctcagcccccgctcctgccggtgccgcccgccctcacccacctatggatgctgcagagggtctccgaaagctctgcatatccacgggccccgggggcagcgggggcttggctggagggtgtcccaggctgctggcagggggcagaggcctccgccggggtggatggctgggtctgaggcctggcctggcccctccactgtgaaccaggcctcctgacctccagcggggtgtcccagccgctccaaacccagggctgagcgggtgccgggagctgaagccggccacggccgcaggcagtgagctctcggaagcggagctggggagtggaggctttcgagggagatcaccgaagaactcaggctgcgggtgtctcttgaggacagcgctgggctcaggctgtgagaacttgcggggtggcccccggcgctccggctgcagcagcttcctggggagtgagttgaactcgggctctgaggaggtcctggggaggccgcccagctcgggctgcgggggcttcttggagagcgctttgaattcggccggccgcggcctcttgggaagcacgctgacttcgggctctgaggaggtcctggtgaggtccccaagctcaggctgcggaggcttcttgggaaagtcactcagcggaggctgggaggcctttttgggaaaggcgctggagtcgcgcttcggctcgctggactgaggcttccagaggggagtctgagcggcctcgctgaactcaggctgcggcacggacttcttagggaggccaccgacctgaggctgcggaggctttttggggtacacgttgaactcaggctgcgcaggcttcttgggaaaggtactcaactcaggctgcggggacctcggggtagcctcaccggcctcgggttgccagagcttcctggggaatgcgccggatttgggttcggaggggggtctggcggggtgactgagttcgtcgggctgcaggggtttccgggccggcgcaccaggctccggcagcgaggccttcaaaggggcctcaccgacctcaggctgcaggggcttccttggaaacggagtggcccccagctgtgggaacttcttggagaggtcactcaactccagtttggacggcttcttggggaggtcagtgacctcaggcggcgggggcttcttggggaggtcagtgacctcaggcggcgggggcttcttggggaggtcagtgacctcaggcggcgggggcttcttggggaggtcagtgacctcaggcggcgggggcttcaaggacactgcaccaaactcaggcagcggggccttcttggggtgctcgcttagctcaggctgggagaacttcttcagtttaccaaactcaggcttcggaggttttttgggcaggtcgctgggctccggctgagaggcctggaactttgctttgatgctccggaagtcctgatggctctcctaggagacgcagagccaatgaggcaggggctcaaacacacagaaggggcatggaaggatgggcctggggaccctcaggcacagcccacaaccaccacccctgcgcccaggcccggtcagccctcagctctttcccaggagcccccatggatcctaggatcctgggaccgacacccctccctacttctccatttagtgctgattccacacccaacctcctctagcagcactggagatcccgacatccctcctgcagcctccagtcccactgccctccccccatgggtggtaccccacccccccagcatccttgaccccctcattctttcacccctcccactgcatgtctccagtctcgttccattgcccaggctggagagcagtggtgcaatcatagctcactgcagcttgcaactcctgggctccaatgattcccccgacctcggcctccccagtagctgggattacaggcttgagccgccgcgcccaggcccccagtcccttctgtgctaatttcaaaacacatccggaatccaaccacttctcactgccttcaccactgtcaccccaggaggtagtgggaggcagtgtctgccctcccccaaccaattgcctggattactctaacaagcccttccctgggcctctgcctacccccttccctggtcagttccccccatggcagctggagggagaagcctgttgaaccctgagtctgtttgtgtccctctgctcaaaactcggcaatgcttcctcatgtccccacagttcaagctaaatgcctcataaaagcctgggcgaaccagcctccctacccagccaccttctcctccctgcaccctgaacacttccctccgacctcggggcctctgccctgtccctgacccaggacatgtctctgcaccacctgggtctctccttttcctcctcccagcctctgttctcatattttcttattagagaggccatccaaggccaccctatttgtttatttttattttttgagatggagtcttgctctgtcacccagactggagtgcaatggcgcgatctcggctcactgcaatctccacttcccaggttcaaatgattctcgtgcctcagccgcccaagtagctgggattacaggcactcgccaccacacctggctaatttttgtattttaactagagacagggtttcaccacgttggccaggctggtctcaaactcacgacctcaggtgatccaccctccacccgcctcagcctcccaaagtgctgggattacaggtgtgagccaccgtgcccaacctagaccaccctatttttctttctttcttttttttttttttttttgagacggagtctcactctgtcacccaggttggaatgcagtggtggaatctcgccatactgcaacctccgcctcctgggttcaagcgattctcagcctcctgagtagctgggatcacaggtgtctgccacgacgcctggctaattttttttgtatttttaatggaaacagggttttaccatgttggccaggctggtctcgaactcctgacctcaagtgatccacccacctcggcctcccaaagtgcatgagccatcacgcctggcctagaccaccctattttaaatggatcaccccatcccactactgccctgcattcagcatgcatgattttctccatcgtacccacccctacgtattatactattttacattgtttttaatgtgtcttgatttttttttttttttttttttgtctctctacaccacaacttccctcagttcctcagcctctgcaaggcagagacttggctcattcattgctgtcttcccagggcctggaacatggtaggtgctcagtaaatatttgctgaaataaacaatattcaggcagcacaaagacagccatgtactcagcctgaccatcaggaaaacacagagatgcctggagacggccatgcggtccctctcacaccgtctctgacatgcgggctgatggtcaggaatgctcacagttgacagtgcctgagaggattggtgcagacaccgtgggcacaggcgctgtctcctgcatacccagctgtcccagctgccctcctagctggccctgcaaccactcctcacagaggtaggcagattcacaagaaggccaggcctccttagtcctacaaacgcccctttcacctgtggtcaaggagattgggggagggaaagggcagaaacgtgtggcctttgcttcctgcgtgtgcctcactttccccatccagaggaccagagaccaggattgctccttggaaaggcagcaattcccacctggggcctgaagtgcccctgtcaaagccccgagtggtttgaaggaagtgctcccgggcgaccacagggctagataagtcagggttagcaggtcacaacttgggtgactggacgggggagggtcatgacccactttgtcaccccgcaggaaagcactgctctcaccccagcagcccgttcccacatggctgctcatgttgacctggggagacgggagttgtccccccggggagtcccatctgtccccctcgcagtcccaacctgagcgtgaacccccaggagcccgcgctgtcctggggtgtgcctggtggccgcctacctcgggtcctttttgccgacccttcccgtttcccagatgtctttcgcagccaccccccgcccccccgcccgcccctccacaggtggatcctatccttctgggaacatctgtgtcccttgcttcccagccagtgaggcacaggcctcttccagcactcaccatggctgcaggcaggtgatgggccatgggatgagtgggacccgagctggggccgctgccttcaggaagtgactgtggcttctgctccacggtcagcacacagggtgggggctgctagaggtggggcgggggagggcagaggaggaagggaaggaggtggggaggctccagtccgtctccagatcctgccagccacttctttttttttgagactgagtcttgctctgtcgcccaggctggagtgccatggtgccatctcggctcactgcaacctctgcctcccgggttcaggcaattcttttgcatcaacctcctgagtagctgggattacaggcgcgcaccaccgctcctggctacttttcgtatctttagtagagaaggggtttcaccatgttgggcaggctggtctcaaactcctgacctcaagggatcggtccgcctcggcctaccaaagtgctgggattacaggtgtgagccactgccccggcccctgctgggcacttctatttcgcttgaattcctgtcctgcctgctactgtcccaagcttggggcactggttgcccgcatgttcctaacatggtcactagtttctttcttttttttttttttttttttttttttgagacggggtatcactttgttgcccaggctggagtgtagtggcgcaatctcgactcactgcaacctccgcctcccaggttcaagcgattgtcctgcctcagtctcctgagtagctggaattacatgcatgtgccaccactgccggctaattttttgtatttttagtagagacggggtttcaccatgttggtcaggctggtctcaaactcccaacctcagatgatctgcccgcctcggcctcccaaagtgctgggactacaggcgtgagcaaccacgcctggccaactagtttcttactctctatagtccccatcattcctactactttggtgtccccatctctggactccagggaggactccatgccaggccctggtgacctcctgggctagagagccacaggatggggagatctcagcagatcaggggtacggacagctctggggtttaggaggctcctggggaggcccagaggcccaggacgtgggggcccatgtgaccgggtgaggcctctgctgtctgccctggttggctcatccgccttcctcatttcaacacttccatgaaatccaattcccggctctgagcaggactcacttgttctggggcagatatcacaggccatggatgtcccaggctgccgccctgggcagaaagcttagctggtacagcagatttgggggtcggtgggtgagtggtgtcaaaggccttgcacctgggccacgcacggtggctcacgcctgtaatcctaacactttgggaggctgaggcaggaggatcacttgagcccaggagttcaagaccagcttgggcaatgtagcaagactccatctctacaaaaaatataaaattagccaggtgtgatggtgcacgcctgtggtcccagctgcttgggaggctggggtgggagaatcacttgaaccctgaaggcggaggttgcagagtcaagatcacgccactgtactccatgctgggtgacagagagagactccatctcaaaaaaaaaaaaaaaaaaaggctttgcagttctggaggagtgagggggtctgaggacccgaggacacaccagattcccagaggttagaggtagtagagagaagaggaaccaggagacagagacaggggccaagagggggtgaaggcagtcacttgtggtgccgaggactggccagataaggacaagccctgaccacagagctcagcccacaggagatcagtaatctccgtcacggtagacaaagggagaaaacacctgctaagagagtagagagccctggttttcagtttgagcacatgttggaattgcctgaacagttaaaaaaaaaaaaaaaagaaccggcggttgggcagtgtggctcacgcctgtaatcccagcactttgggaggctgagtcgggtggatcacctgaggttgatcacctgaggttgggagttcaagaccagcctgggcaacatggagaaaccccatctctactaaaaatacaaaaattagctcggcgtggtggcgcatgcctgtaatcttggctacttgggaggctgaggcaggagaattgcttgaacccaggaggcggaggttgcagtgagacgagatggctccactgcactccagtctgggtgacagagcaaaactccatctaaaaaaaaacaaaacaaaaaacagaacctacaagaaactctgacttaatcagtctggggtgtggcccgagcaagtatttttaaaacattttaaaattttttttttgagacaaagtcttgctctgtctcccaggctgcctcccggcttcaagtagctgggattacaggtgcctgccaacatgcccggctaattttctggatttttagcagagctggggtgtcaccattggccaggctggtctcaaactcctgacctcaagcaatctacccacgtgggcctcccaaagtgctgggattacaggccttagtcactgcgcctggcctgcctgttttcacgcctcctttaagagcacagacatcaggattctgccatctctgttgtgcctttgcatcctgtcctggggcacagttcccagatgtgggttgccctcccaaaaaggagtctcgggaggacagtatgggctctctgtgggtctccagaaccttggcaagtgaaggaaagaatgaaagaaagaacaagtggccaggcgcggtggctgacgcctgtaatcccagaagtttgggaggccaggcgggcgtatcacctgaggtcaggagttcgagagcagcctggccaacatgatgaaaccctgtctctactaaaaatactgtttgtgcacacctgtaatcccaggtacctgggaggctgaggcgggagaatcgcttgaacccgggaggcggaggttgcagtgagctgagattgcgccattgcactccaacctgggtgacaaggcgagacaccgtctcaaaaaaaaaaaaattaaattaaataataaaaataagtaaataaataaatcaagcaatgcttggccacagtaaggagctcaatcaaggtaattaaaggattggatgacagctgatggattcccaggtgcctgggctggtcactacccgtgcactctcgcagctaggagggtccagccagggcgcgcgcaccaaggccccacgggggcgccgtgggggtgaagcgcaggtcccggagctgtagtcatggtgcgcctccccgccaactaccctttgtgtatttggcgcctccgtaggggctcccggcagggttccgcgcggcgcggctgcagacagggacagatagggttaccggaatcccggagaagggagcccggaccaggggagtgagagttcgttagggcgcgccttggggaatctgcggggtcggaaacgcgaacaacggtgtgcagggggaggagcccggggagcacgtgggcggcggatcccagggccgcagggcgccctccacctccccgctcctggcccgcaatgagggtaaccggaccggcacctgcaagtgacagctggggctggacaaatgccgggcacgggcctctggccggcctcagagctgttcagcgcgagcccgcggcttccagccaacctgcccgctatccccactgctctcccggctttcattcccccgagtctgagattcctgggcgccccctgctgggcggagccggggcccaagagggctgggctcctgtgcatgggggttgggggccggcttgagggtaggaggtcgtttctgcagtggacagggtgaacggtggaggacaggtggtgagccagctccccaggcctcgcggcagtcagttcactccagagggtagtgtggtggccgtgggcccgctgtacacacaggaagggctgtcccatctccgtgggtgatggggtaggggagaggtccctggacggacgtgttggctctaggtttctctggaaagatactgacagactgggaagaggcgtggcctagatctgggggtggccgaataaagaaactgatggggacaaagactcctgggggcccccgggaccctggagaggggttaggggcctgggggacagagaacacagcgctgtccctggagatgggggagaggcttggactacagccagatctagggacctgcagaatgcgggaacaggggcgtgtcctctggacctgctggcagggttttctcttctcgtggtaaccgtgcgcagctcccaagatggtgcagaatcagtgccgctgactgggaactggggctggctagaggcctcctagcctcaccttctctatatatctgtaaaatgggccccttcaccctgtcccaccctcctccccaggtcgagagagtcccaggcagccatgggctcgggacgtgaagttctcagcagacatttcccaagcccctcctctccctgcagcctctcttttcatcctcgcgtccaccccaaaggactcaccagtcatcatgacacccttttaaggacgagggaattgggaggcagggaagtcgactcttttccagggtcccacagtggtggtttcaaggcttctggctgagaagggggagcttagggggcctcctgatggcctgtcctaccccatcctgacaaccacctcagctggggcctacaggttctgggagagtggacacccagcccaagccacgtcagctgaggctgctgccccgtcacatcacagccccatcaaggacagagcagtcttcaggcccctggtgaggcggtgggcagtggggcagacagacgggtcccaagggcctgaggatcccctcctgccccttgcagtggctgaagggcttctggagcccagagctgtccatctttgaggtgacatggcactgagcaggtgtggggcaggtggcccttggcttgtctacctggatggctttgactcagagcctgaggtggacacgttggtggatgaaaagtccaaggaagataggtgcggtggatcacgcctgtaatcccagcactttgggaggccgaggcgggcggatcatgaggtcaagagttcgagaccagcctcgccaacatgctgaaaccccatctctactaaaaatacaaaaaattagccaggcatggtggagggcacctgtaatcccagctacttgggaggctcaggcaggagaatggtgtgaacctgggaggcggaggctgcagtgagctgagatggtgccactgcactccagcctgggtgacagtgcgagactccatcttccaaaaaaaaaaaaaaaaaaaaaatctgaggaagacaacaaggagggtggcggggggcaaggagaaggtgggagggcagtgacggaggagtggggtctgggggccccgcccaggggttactggtgtctcggctgcagataccaggatgaggaggtgagggggaaccccgaagtggattcagagaatggagaaaggaggaggaggtaaggattgagacaaggtggactgcgtgaaggaggtccctgggttcttgctcacaggatgtctgtatatccaggaggatgagggagacagtgagtgttgttctgggaggggaccgagaggttcaaggtagggccttgtgggctactgggagaacaggatcttcatccagagggccatgggaagccactgaagggtgccgggcaggagaggggaacaatcagaagagaccctggcagggcgtggtggctcacacttgtaatcccagtactttgggaggccaaggtgggtcgatcacctgaggtcaggagttcgagaccagcctgaccaacatgttgaaacctcatcgctactaaaaatacaaaaagttagccggggtggtggcaggcgcctgtaatcccagctacttggaggctgaggcaggagaatcatgtgaacccagaaggcggaggttgcagtgagagctgagagtgtaccattgcactccagcctggcactgccattgcactccggcgagactctgtctccaaaaaaaaaaaaataaataaaataaaaagaggaagaagagactgttttctgttttcagtcttggggtaagggcaggttggggagagtagggggtgggctaggggaccctggggctggcgagatgaggatagaagggagagggatcatggaggtaaaaccagcttccaagggatggctgtggatatcacctgggacttccatacctgggaggctggcttcaggggtgaggagaaagaccaggccatggagggctggccttgacccaccccactcctcagagctgggacatggtggaaattggtctggcagacagcaaggaggatgaagacctgagtccccagcctgcctccccaatcccaaaggattcttccccttaagtcagtatggggttcagggtctgggggtcttcaggccatcctggccagtccctgcactttctcaggaccagccttccagcctgtccccgaagctcctgggattttttctttttttgtctcccaggctggggttgcaatggtgtgatgatggctcactgcagccttgaactgctgtgctcgtgatcctcctgcctcagcctcccaggtagccaccacggctatttttttttttttttttttttaagacagagtttcactctatcacccaggctggagtgcagggtcttgatctcggctcactgcaacctccatcccaccgggttcaagcgattctcctgcctcaggctcccgagtagctgggattataggtgcccaccaccatgcccgactaattttcatatttttagtagagatggggtttcaccatgttggccaggctagtctccaactcctgacctcaagtgatccacccacttcggcctcccaaagtgctaggattacaagcatgagccaccatgcccagccatgcctgattattttttgtattttttttggtgggcggggaggtagagatgcgatcttgctaggttgcccaagctggtctcgaactcctggcctgaggcgcccctcctgcctcagcttcctaaagcactgagactgcagacattagtcacctctcctggttacgggattgctttttaattttctttatttttgagatggagttccactcgtattgcccagactggagtgcaatagcacaatctcagctcactgcaacttccacctcccaggttcaagtgattctcctgcctcagcctcccaagtagctgggactacaggtgtgcgccaccacacctggctaattttttgtgtttagtagagatggggttttaccatgtaagtcaggctggtctcgaactcctgacctcaggtgctccacctgccccagcctcccaaagtgctgggattacaggcgtgagccactgtgcccggccgggacttcttaaaagaaaactggagaccgggcgtggtggctcacgcctgtaattccagcactttgggagtctaaggcgggcggatcatgaggtcaggagatcgagaccatcctggctaacgcggtgaaactccatctctattaaaaatacaaaaaattagccgggcatagtggtgggcacctgtaatcccagctacttgggaggctgaagcaggagaatggcgtgaacccaggaggtggagcttgcagtgagaggagattgtgccactgcactccggcctgggagacagagcaagactgtctcaaaaaagaaaaaaaaaaaaagaaaaaaaaaaaaaaagaaaactggagagtccccatcccatttggtttctggacaagggagaacgctgccacagtgggtactggggacctcaaccacagctggaggtggggacctgggtcccaggattggggtgatgggaagacaggacacaggtgggctgtgaggcctgcacctgtggacccaggtggtcctcccaagatgtgatcaatccatgactgctgggctcgagcccactatgctttggatggacaagggatgggaacacagcataggctggctcatggcgccttctttattgtccaccccagccccccttccctgcagccccctccaaatgacaaaactacccacatcccatggcccacccccaaagcggcgggattcagagctgcgagaacactggaagctccccctctgacagcagcggcgacaccttgggtgcaagcggggccggatctgggtggggcagaggaggggggcgcctgagcctcagcgccttgggcccccgcccccctctccacccgcgcattcctcggccttacccgcgggggcgtcggggcgcggcggcccggccgcgggggccgcgggggcgccggggcggtggtcctccaggtgcagggtcatggcgggccgcgaggccgtggagaaggcgcactgcatgcacgagtagcggccgcgtgtgtgctcccacacgatgcggctcggggccgcgtgccctgcgggcaggcgggaccccgtcagtcccgggctcccccagcccagaagacccgtgcgccaaggatggaggacgccggcgagggtgggtgggactttttcccgccccccatcagcttccgggcgcctagttcagtttctcccgggtctgtctgcccctagagttgggggcacccaacttggcttctccgcgtcccctactatcatccccagattcactgttggggagaagcccgctccgaggtgaacggtgaaaggggcgcaaggtttatacgggaacgccggcgcagatgaaggcgcaggtgccagtcatttttaaggcaaaaatcctgtatttcgggacggtggcatttgtgccccctgggaaggggatgagcactgctgcctcctggtatccaccagaccccgcagggcgcaggaaagaaagcccctccacccctccctggtggtcacctgcacgcacctgagggcgcgtcggagccgccctggggtcttcgggggctgctgccagcacctgcggtaaaggggcgggtcaagttcagagtcagggcgagcccagccagccctcctggaggcccccgaccccacactcaccttggctctttttccagacggcggcgctggaagccggcggcccgggtgcagcggccaggaaggggcgcaggcgcggggggcttaggccaaagggcgcagggttcaagtagggcaggaacggtccggtgggggcaggggcgggggtcgtgaagggttccagcagcgggaacggcaggcccggcgctgatgcggggtcaacctccggggggcgctccggcgcgggcggctctcggtccagggccgggggtggcggcggggctgggctctgcgcatgctccgcgcaaacatgcaggtgcttgaagagcgagcggtgcgtgcggaagcgcaggaggcagttctcacacctggaggtgggcagagggctgggctgggctgggcctccaggggcaccagggagagtgtcctgtgcaatgccacccgcccttcgagcgtgggaacggagcctgggcactaatcacctccccgctcctgtacaactgtggcagcgacccttcctgaccacttcgggtgggaacctggggaaacccggaaagaagtctcaattttaagttaggcggccggttttccacttgggaggtaaagcctggctgggtggggccacgcccacgtatgccccgccccatccagggagttgagggcggggcttccccaaaggcccacccacatcaagtcccgccctccaacaccctgaccaggaagggaggaaggcctggagcccacacatagggtgaggctagggcagggcggagctcaagaggtcagggtctcacttgaagtagcgattgggtttgtagtgcagtttgctgtgagccaccagctcctgcatgctggggaaggtctcggtgcagctcagggctgagcagcggaagagcttgcctggtagggatgaaggacagagaagtggagacaggtggccaaggctggctccgaggggctccgcctgtttcccaccctaacctgcctccccattaccagtcctggccctaccttccagggactgtgtgggcgggcagtgggttcgcagatgctgtgccaggtcacggacgctgggaaaactgaggcagcagccagggctggagcaagggatttgcttccctgcaggacgcacagaacagtggtcactggtcccttcctcactagtgctgtccctgaccccagggttctgccccagagaagcaaatatgatgtgctggggcctttactctctgcctaccacaacagactggtctgccacagtgcaggggctggactggccaggctcaccattggagccacagcctggcatccaccggctgctccgtaaaatgatgagtggcatccctctagaaaggccctgaggttagagattctctacgtctcgcttctattgtttcagggactgtgattccccagaagaccccatcacagatcacctggaggtgggcgtcgtctgggaggccgcaggtcctcgctggtcccggagactatgctggtcaggccagggctgggtccggggccaggctggcagctgtctggggctggggaggagccctgctgcatccctccagcccctccacgttcccacactggcggtgtggctgcctgctcagggcctggctcctccgacatggaggaggaaggggctgcagctggcacagccggggacaacacctccttgtcggtctcactggagctgggctctgcagtggccagcatgtctgggatgggccctgagggtttctcctcctggtggaaggaagaggcggagagaacccttctgggctctgggtcaacccagtcggcccccatcctaaggaatcaccagcaggagaggataggggaatacgtaagggtggactaagctctttttttctttttataaagatggggtctcgccatgttgccctcactggtcttgaacccctggtctcaagtgatcctcctgcctcagcctcccaaagtgctgggattagagtcgtcagccactgcactggcccggattgagctccttatgcatacgggagaaacatctgctctcctcaactaggataggtgggagccccagtatgcacacaagcgtggcctagagggagtgggcggggccaaggctacggaggcggggctatgggcaggcatggactgggaagatgctagaggagctagacatggattgtctgaggaccgagaccggccggcctcgagcagtgtggacaatcttggaggtgctgggggcccggatgtaagaagtttaggggcggagtcctagcctgacgggcgtggtccattccgggccgggcccggaagtagggcgctctccgagtgacagccagcggcggacgggtgcccggatgtgggggcggggtcggccggaggctgtaggcgcgacagggccgctccccgccagtccccgcagctccgccgcgcccgcgaccccggtgccgcgctcaccatcttcgacacggctcggcctcttgtttctgcggctccggcggctgcagcttaggcggcggccaccctctgggcagtgcgagttcgcgctcacgtcagcgccattttccacctctcagctctcgcgagactgggggcggggcctgcgcagggcgctcggagagggggcggggcctgagggcagagtcaccctggagctcaggtcggacgctggtgcaatcttgctatctatccccgggcagtcagcgcgcacttcagcagactccgtgcacggagatccgggatgacctcgctgtcctagtcttcaaagtgggcaccttcatccctctagtcttgtcccaagatcagccctggacaggcgataaacagcagttctttctttatattttttatttttttttgagacagagtttcgctcttgttgctcaggctggagtttaatggcgcgatctcggctcactgcaacctccgcctcctgggttcaagcgattcttctgcctcagcctcccaagtggctgggattacgggcgcccaccaccacgtctggctaattttttgtatttttagtagagactgggttttaccatgttgtccaggctggtcgtcacctcctgacctcaggtgatccacccgcctcggcctcccaaagtactgggattacaggcgtgagccaccgcgcccggccagttctttattttttatagtgttgagacagggtcttgctctgtcgcccaggctggagtgcagtgatgcgatcatagctcgctacagccttgacctcctgggttcaggcgatcctcccatctcagcctcccgagtagctgggattactggcgtgtgccaccatgcccagctaatttttaaattctttttagagacagggtctctctgtgtgttgcccaggccggtctcaaactcctgggctcaagcgatcctcccgccttggcctcccaaatgttaggattgcaggcgtgagccacctcgcctccccttgcactcacattttaaaatggggaaacagcatcgctcgagccagggacgtcgaggctgcagtgagcgtgatggcaccactgcactcctgcctggtcgaaaaagcgagacccccatctctaaaagttaaataaaaatggggaaatagtaaatcaacaagtgcaaaaacaatcttttgtcctattcagagcaatgaaggaaacaatgaaatgtcgaagtgatgggtcagggaagccactctgaggaggtgacttcggagctgtctccagatgatcaaggagtgagctggtggaaagcccgaggagcagggggctctaccggatagctggtggtgatgtcctggagtggggcaggacgggcttattttggtcaaagagcagcgaggtggccagggcaccactggagcagagtggaggcggggtgtggaggtcagaaagcgaatatggtgcgcggcaggtcacgcagggccatgggagtggtgcagagagaggagtgtggtttatgttgtaaccactgatgaatttttagcagggggaggcgcatcatctgattcctggcagtcacttggagtaggatgggctgttgagagggcggtaaggtagatctaacatcttagatctctctgctgccatatcatctaagatgagatcatcttagatctcatcatgctgccattcaagaggtattcgttgagttctaggcaactgtagggttttttttgttttgttttgttttttttggacgacatcttgcactgcacccaggctggagtgcagtggcgcgatctcagctcactgcaacctccgcctcctgggttcaagcgattctcctgcctcagcctcccaagtaacagggattacaggcatgtgccaccatgccaggctaattttgtattttcagtagagatggggtttctccatgttggtcaggctggtctcaactcccgacctcaggtgatccgcctgcctcagcctcccaaagtgttgggattacaggcatgagccactgcacctggccacaattgtaggttttatgtgcagtgtatttccatctgcaaagcaagttgtacctatgcactttttttttttttttttgagacagagtctcactctgtcccccaggccgcagtgcagtggcatgatcttgcaagctccgcctcctgggttcaagcaattctcgtacctcagcctcccaagtagctgggactacaggcttgtgccaccacgctcagctaattttttttgtatttttagtagagacggggttttgccatgttggctaggctagtcttgaactcttggcctcagagatccacctgccttgggcttacaaagtactgggattacaggcatgagccactgcatccggcttttttgtttgtttttttgagacacagtcacactctgttgcttaggctagagtgcagtgatgtgatcacagctcactgcagcctcaacctccctgggctcaggtgatcctcctacctcagcctccctagtagctggtactaaaggtgtgtgccaccacacgcagctagtttttatatgttttgtagagatggggttttgtcacattgcccaggatgttctagaactcctgggctcaagtgatctatctgcctcagcctcccgaagtgttgggatttcaggtgtgagctactgtatccagccccctatgggcttttatatgcagagaatacctttaggagatatttaaaaactggggagaggaacagggatgtttgagtgggagagagactgagttttcacttttgtgttttttgaattattattatttttttctgtccaggcatggtgtctcaagcctgcaatcccagcactttgggaggctgaagtgggaggatcacttgaggccaggggtttgagactagcctgggcaacagagcaggacgccatctctaccaaaaataaaaagattagctgggcatagtggcacatgcctgtagtctcagcttcttgggaggctgaggtgggaggattgcttgagaccagaatttagaggctgcagtgagctgtgttcatgccactgcactccatcctgggcaacagagcaagaccgtgtctctaagaaaataaaacaaaaggccaggcacggtggctcacgcctgtaatcccagcactttgggaggctgaggcgggcggattacgaggttaggagttcgagaccagcctgaccaacatggtgaaatcccatctctactaaaaatacaaaaattagccaggcatggtggcacgtgcctgtaatcccagctactcgggaggccgaggcaggagaatcgcttgaacccaggaggcagaggttgcggtgagccgagatcatgccactgcactctagtctgggcaacagagcgagactcagtctcaaaaataaatacatacatacatgcaaaaataaaaaataaaacaaaaacaaattaaaattttttcttttaattattattcattcagttgaaaactcatttcatttaaaaaacaaagatcattttaatgcagggtaaggatgtgtgtgtgtgtgtgtgtgcgtgtgtgcaggggaggctagtgcaatctggggaaggatggggtgaggtggcagaagggacagggacccaaggaaggaagggagaggagggactggacttaagaaattttgtaaaagagtcaacaggatgtgggggtgagcagcaggcggggcacacatgactgaggtctgcagtctgaagatgcctgtaacctagataggagatgattatcttttagcatatgctaaacgtttaagataatggccatggtgccgtgcacagtggctcacacctgtaatcacggcactttgggagggtgatgcgggatcatgatttgattctgggaatccaaggctgcagtgagctatgatcataccactgcattccagtctgggacaacagagtgaaaccctgtctcaaaacaacagcaacaagaatcagatgctggagtgcagtggtgtgtgcctgtaatctcagctactgggggaaggctgaagtgggaggatcgcaggagcccaggtggtcgagaccagcctgggcaacacagtgagaccccatcttcaaaaaaagaaaaggaaattcagagatggaaagcactagggccattcaagagattgctaaatgcttttgtgtcatcattgagcaataaaagggcccttgagacccggttgcagccttgagaattttttccagccatgctcagcttcccaagacaggcacagaagggagaatagattctgcagaaggttctgctggccattcttgctgtctctctctctctctctctgtgtgtgtgtgtgtgtgtgtgtgtgtgtgtgtgtcacagtcttgttctgttgtccagactggagtgcagtggcacaacctcggctcactgcaacctccacctcccgggctcaagcgattctcctgcctcagcctcccgagtagctgggactatagtcgtgcgtatcatgtccagctaatttttgtatttttagtagagatggggtttcaccacgttggccaggctggtcttgaactccttacttcaagtgatctgcccacctcagcttcccaaagccctgggattacaggcgtgagccaccgtgcccggctgctagtcttgctttgattcctggctctactggggattcccgatgccccattcttccgttgggtaggtattctgtgcccgcagttcgctcatcacagcttagatcactctgtgcagtgcttgtcaaccaaatctgctgagaccgaccctctcccaccttcctggctcctgctgcaacgcccattccacctctgaattcccctcgcttctgtgggccagtcctcacctcaccagtcagccccatctctactggactggcttctctttgaggggctgagcacagagcgggtgtccatattagaaagctacaattaattattattattattattattattattatttttagagagagacagggttagctctgttgcccaggctggagtacaatgttgtaatcagctcactgcagcctcgacctgctgggctcaagtgatcctcccatctcagcctcctgagtatctgggaatacaggcatgacactagctttttttttttttgagatggagtctcactctgtcacccaggctggggtgcagtggcgccatctcggctcactgcaacctccgcctcccaggttcaagcaattctgctgcctcagcctcccgagtagctgggaccacgggcgcgcaccatcacgcccggctaattttttgtatttttagcagagatggggtttcactgtgttagccaggatggtctcgatctcctgaccttatgatctgcccgccttggcctcccaaagtgctgggattacaagtgtgacccaccgtgcccggccaattttaaaatttttttgtagagacagggtattagtaggttgcctagggtggtcaaaccttaagtgatcctcctgccttggcctcccaaagtgctgggattacagctgtgaggcaccatgcttggccaggatttggtttattttagtattagagacagggtcttgctgagttgcccaggctggagtgcagtgacgcgatcatagctcacttcagccttgaactcccgggatcaagtgatcctccagcctcggcctcacaaagtgctgggactacaggcatgcaccaccactcccaaaattcaggaatttttttttttttttgagacagagtctcactctattgctcagactggaattccatggtgcagtcttggctcactgcagcctccacctcctgcctcagcctctcaagtatcagggactacaggcacgtgccaccatgcccagctaatttttgtatttttagtagagacagggtttcaccatgttggtgaggctggtctggaactcctgacctcagatgatccgcccgccttggcctcccaaagtgctgggattacaggcatgagccactgcgcccagcccaaaattcaggatctttaggctcagaccatagcaggactccagtcttagtcccagttaggtgaagactaagagggcacagaaatgggattggggtgcagggggcaggagtgacccagagtgcattgagggtgggagcatgtggcatgtgggacctgcctctctccataggtcccagatgggtttggcggctgtagcttcaagactaacaggacctgctggaccatttgggatgcagattttggaagggaaactgagacaaattctttattttcttttctttcttttttttttttttgagatggagtctcgctctgttgcccaggctggagggcagtggcgcaatctcggctcactgcaagctccttctcccaggttcatgccattttcctgcctcagcctcccgagcagctgggactacaggcgcccgccaccacgcccggctacttttttgtatttttagtagagacaaggtttccccatgttagccaggatggtctcgatctcctgaccttgtgatctgcccgcctcggcctcccaaagtgctaggattacaggtgtgaggcaccgcgcccacctcctccctccctccctcccttccttcctttctttttttctgagacagggtcttgctctgttgcccaggctggagtgcagtggcatgatctcggctcacggcagcctctgcctcccgggttcaagtgattctcctgcttcagccttcccagtagctgggattacaggcaggcaccaccacacccggcttttttttttttcttttttaaatttttagtagaaacagggttttgctgtgttatccaggctggtcttgaactcctggtctcacgtgatctgcccgcctcagcctcccaaagtgctgggattacaggcgtgagccactgcgcccagcccaaactgggacaaattcaagctttatggtcacatatgaatgcaaggcatggctctgtgcagtcttgggtcagtgaacctctctgaacctccattgttccacctgtaagatggggtccttcacagctcctacctcacagggctgtgaaaacatcgtccttgttgggcacttagtaagttaactcgtgctttcacctggcaaaggtttattgccttagtgatgacagaatgagcaaagtcacgcttgttaaggacccccccctccccaactgtgcctggcactttgccaacagcacaggactcaagacccatttcttaatcacatggcagttgggaggtagattctgctgttagtcccctttgacacacacagaaatggagaatgggcagcaggtgtgatgttggaggaagaccagggcccaggggcgggggctgcagcagtgacctggtgacccagggcctgggcaggactggaggccaaaggactggacttttaggctattgcagcccaggtaaacgaggctctcattggcagggcctggctccccaccaggccggcaggcagataggcgggcgaaagagaaggcagtatcccagggcccagctcagatcttctccacgtagtttcctgggaaaaggccctcctggccgtgaagccggcccttccaccagcccgagggatctgtgggagagaggaaagcttgaggtgcccctagctggccctggagaaagctctcatgcctggtctgtccatcttgttcatggggactccctatgttgtccaggctggtcttaaactcctaggcttaagccatcctcctgcctcagcctcccaaagtgctggaattacaggtgtgagccactgcatccggccatttctactctttaaaagttttttttttgtaaatcttttgtagagatggggtcttgctaggttgcccaggcttgtctcaaactcctgacctcaagtgatcctcctgcctcagccactgaaagtgctgggattacaggtatgagccacctcgcccatctgttatctctgttctcccgtggggagggtgtgcagtggtggggtctgcctggcaatgtcagtcagggttctttttttttttttttttgagacggagtctcgctctatcgcccaggctggagtgtgttggcgcaatctcggctcactgcaagctccgcctcccgggttcatgccattctcctgcctcagcctcccgagtagctgggactacaggcgcccgccaccacgcccggctaattttttgtatttttagtagagacggggtttcactgtgttagccaggatggtctcgatctcctgacctcgtgatctgcccgccttggcctcccaaaatgctgggattacaggcgtgagccaccgcgcccggccgatgtcagggttcttaccactcccctcaccccagcttctgccctggtacacacaccttccatgaggatctcaatgacctcgttcacgttgaagctcagctcgtccacatcttggcccacgtactggtatagggcccggcacctgggaccatgtgtccgaggctggggcttgggtcggcccacaccaggcactggccgttgccccacgctgcgcttcctctgcatgctgtgggcacagggggtttgagtcacagccccagacactcccctaccccctgcccacctcctggagctgccctcccaccccacctacccggccatgccctggtcaggcacgttgaggaattctgtgttgtgctctgagggcggacgtgcccggggtcgtctgctggctcccagggatgtggacggagggccccggggaggcctgtgggtgccccctccagacatgatctccaggggcagggggccccctctggcagaggggggcaccccattgcgatccatgcctgtggcaggagcaaggatgaagacatgtattagggtgatgctaggaggatttgaggaggacttggcttcaagttctcaggctgagggaggagactgcgacactctcaacccagtgtggtaaggattgggccagacggagggactctgccgctaggagggcctagacagaagcttttttaagcataattttaaaattattttttacttttttttttttttgagatggagtcttgctcagtcgctcaggctggagtgcagtggcgcgatctcggctcactgcaagctccgcctcctgggttcacgccattctcctgcctcagcctcccgagtagctgggactacaggcacctgccaccacgcctggataattttttaaatatttttagtagagacggagtttcatcatgttagccaggatggtctcgatctcctgaccttgtgatccgcccgccttggcctcccaaagtgctgggattacaggcatgagccaccgcgcctggccaattattttttacttttatttgtttattttgagacatggtctcactctcgcccaggttggagtgcagtggtacaatcgtagctcactgcaactctgacctcctgggctcaagcaatcctccctccttagcctccttttaaggggagctgggactacaggtatgctccactatgcccagttgatttttataatttttaaagtagagatggggtctcactatgttgctcaggctggtctcaaactcctggcctcaagcaatcctcccacttcggcctcccaacatgctggttttacaggcatgagccactgtacttggccttatttattttttatttgtttagagacagggttttgctctgtggcccaggatggagtgcagcagtgagatcatagctcactgcagactccaactcttaggctcatgatattctcccctctcagcctcctaaatagctgggactataggcacacaccaccatgcccagctaatttaaaaagaatttttaggctaggcgcggtggctcacgcctgtaatcctagcactttgggaggctaaggtgggctgatcacgaggtctggagtttgagacaagcctggccaacatagtgaaactctgcctctactaaaaatacaaaaattagccaggcatgatggcgtgtgcctgtagtcccagctactcgggaggctgaggcaggagaattgcttcaacctgggaggtggaggttacagtgagccaagatcacgccactgcactccagcctgggcaacagagcaagacaccgtctcaaaaaaaaaaaaaaaaaaaaggccgggcgcggtggctcacacctgtaatcccagcagtttgggaggccgaggcgggtggatcacgaggtcaggagttccagaccagtctggccaacatggtgaaaccttgtctctactaaagataaaattagctgggcatggtggtgcatgcctgtaatcccagctactggggaggctgaggcaggagaatctcttgaacccagaaggtggaaagttgcagtgcgctgagaccgcaccattgcaccccagcctgggcaacagggctagactctgtctcaaaaaaaaaaaaaaaaaaaaaatctaggcgtggtagcacacgcctgtagtcccagctactcagggggctgaggcaggagaatcgcttgaacccaggaggtggatgttgcagtgagccaagatcatgccactgcactccagcctgggtgacagagcgagactgtctcaaaaaaaaaaaaaaaaagaaagaatttttggtagagacaggatcttgctatgttgcccaggctgatcttgaactcaagtgatcctcctgccttggcctaccaagagtgcttggattacaggtgtgagccatcttgcctggccaggagtggctttgcaggggcaagtttccctcctcctatcctctgtaggagagcttctgtgggtacgtcttggtggataaataagagctcaacgaatggaatgggaatttgagagagaagcagagaaaacggcccaaaggcctggaggtaagaataaattttgtgaattgggaaaataagatgtagtttgaggccaggcgccgtagctcatgcttgttaatcccagcactttcggaggccgagacgggcgggtcacctgaggtcaggagttcgagaccagcctgaacaacgtggtgaaaccctgtctctactaaaacgatacaaaaattagccgggcgtggtggcgggtgcctgtaatctcagctactcgggaggctgaggcaggagaatcgcttgaatccaggaggtgaaggttgcagtgaaccgagatcgctccactgcaccccagcctgggagacagagttggactccatctcaaaaaaaaaaaaaaaaaaaaaaagatgtagtttacagggcaggagtgtagggtaggaggagagaagatgtcagtggttagctgggtttgggttttgaagggctctgaatgccaaactaagtttagcctttattctgcgggagatgtggagctacggagagtcctggacagagaagtgagtggtaaactgtgtttgttagatttcgtttgctgaaggtctggcttaggccatgggacccacaacagacaagggaatatagcaagggacgcagctcctcacctctggggggcgcaggggccgcccgggtaggggcttgggacgacctccgaggttttcccttggccattcccttccgcgtaggctctgaaagaagagtgtcagggagttgaatgacagacagaccacgctctttgccccgcccacaaatctagtccattctgaggctccgccgcaccccgccccctcaggctctcccattagcaccgccccttaggtacagttacactggctccgcccactaattggcctcgccccccaagggcccaacacctcactggccttgctctttgggcccgcccactttaggtcactccttcatcactacccagttccagggttgccgctctggccgcacccctctacatttctcgcccccgcattggtcatgtcttctccttaacagtctttctctctctctagacccgccccttccttgctgttgccctctctggtccagcctgctggccccgccccactattttgattggtttcctccatggccacgtccctcctccacatttcacgcccactaattggttgcggcctttgtttaaaagtctgtctctctggccgggcgcagtggctcacgcctgtaatcccagcactttgggaggccgaggcgggtggagcatgaggtaatgagttcaagaccagcctggccaagatggtgaaaccccgtctctactaaaactacaaaaattagctgggcgcggtggcaggcgcctgtaatcccagctactcgggaggctgaggcaagacaatcgcttgaacccgggtggcggaggttgcggtgagccaagatcgtgccacaacactccagcctgggcgacagagtgagactccgtcttaaaaaaaccacaaaactcaaaagtctctctctctctctctgtagacactccccttcctggccttcgtccactcttaaccagcctcgctggccccgccccctctgccctagttccgcgcagactcactggagctcttgggcagcccatcgcccacgctgaccgtgagggtccgaccgccaaccttgagcactgccaagtcgccgaagccgcgggagaaggtgacgctgcgggtgccgccaccgccccagccctccttcttcacccgaaactgtagtctatggggagagaagaaagcttgggggcgctggctgaggtcccccgccccacccaactctcgctggttggggcaggggcggggccgcggccggggccgaagcgcagttcggccgggtcggtggggcgggagagggtgcgccgcgccgagaccaccccgagatggtgctggggttggcggggccgtacgtgtcgctgaaggtgaggggcaggggcctccgcgtcgcctcctcgaagcgcttgcacagaaggctgacaaactcggtcttgaagacgctctccaggaagctgtcggcggcatcctcttggaggatgaagaagtcgtcctgtcgcgtgctggggaggggcgggtgagagcgtcaggtgggacacaggtgagggcgacaggtgagagagacagatgaaggtggctgaaggtggatttagggaagggtcagctaagggccaagtcagcggtgaccaggtaggagaaaaagggggatgtggcaaggagtggaagaggtggttacagaagagggccaggtgaggtctagtaagagggtaaggtgcaggacggaaggatttggcatctaaggatcatgagcatagggggcaggtgaacatgacaggtggggccaacagagggctacaggcatggcaccaggtaagattgtcagggtaacagacggggtcactagaatgagggcagccaggggacaggtgagagtgactgtgcggcaggtaaggacctggcttcacctgagggagactccccgcagagcctggatgtccactttcttcttcaagacttcacacacctggcccttctcaggtcccttcttcactttctctcgcccaatcacatacacacacttgggcgtcaggatcaagtcccgcttgatgggctgtggggatgcaggattagaggctgatgcctgtagcctggccagcctggccacagaggatccaccccaggcagaggggtggtgctggcaggtcaggtgaggaaggtgggagccctccaggtgaaggtgtatgagtcgtctgttttgtagacagggtctcactctgtcgctcaggctggagtgcagtggtgccatcatagctcactgcaacctccccctcctgggcttgagtgatccacctgcctcagcctcctgagtagctgggaccacaggtgcgcaccaccatgcccagctaattttggtattttttgtagattcagggttttgccctgttgcccaggctggtcttgagctcctgatctcaagcaaactgtcctccttggcctcccaaagggttgggattacaggtgtgcgccaccacgcctggccatgagttgttatataagaaacagaaggagggctgggtgccatggctcacgcctgtaatcccagcattttgggaggccgaggcgggcagatcatgaggtcaggagtttgaaaccaggctgaccaacatggtgaaaccccgtctctactaaaaatacaaaaattagctgggcgaggtggtgggcacctgtagtcccagctactcaggaggctgagacaggagaatcgcttgaacccaggaggatgaggttgcagtgagccgagatcctgccactgcactccagcctgggtgacagagcaagaccctgtctcaaaaacaaacaaacaaaaaataacagatcaggcgcggtggcacacgcctgtaatcccagcactttgggaggctgaggtgggtggatcacaaggtcagaagattgagaccatcctggctaataccatgaaaccccatctctactaaaaatacaaaaaactagctgggcgtggtggcacatgcctgtagtcccagctactcgggaggctgaggcaggagaattgcttgagcctgggaggcagaggttgcagtgagccgaggttgtgccactgcactccagcctgggcgacataacaagattctgactcaacacacacacacaaaagagcaaaactctgtctcaaaaaaacaaaaaagaaaaacaaaaaagaaacgaggtcagatgggaatgtgttggttggttggttggctagaaaagggtgtttgggtcagtgaacaggtgctgggtaggtaaggcacctgctggacatgggttcccgggccagatgagaacacttagaccaggtgaaagtacttgggtcatgtgactgtagccagctcaggtaaaggtattatggttcaggtgagggtgtacaagtcaggtaaataggagtatctggatcatgagaggaagtgagcgggtgtgtatctgaactctatgagtttgtacaggaaggcaggtgagggtgtacctggtagaagggtgaatgtgcaagccggttgagctggcctgcggtcagagttctctgggtctagtggggatacctgtctcagtgaaaacatttaaggtgatggtatacaggtcacctgagagggcatacctgccacacagacctgtccaaagcaggtgggtggatcaggtgaaggtacccaataatgtgtgtctggtatgtgaagttgtacagatcatgtgaggaggcacctgccacataaacttgtccaaggtaggtgagggtgtccaggccatatgagactatccatccaggtaaagatggtatataggtgatctcagtgtgtacctgccacacataggcctctctaaggtgagggtagggtgagttactgggctaggtgactctctgggacatgagatatgggtcaagtgagtgtgtacctggcccgcccaggtacaggtgacggtaaacaggccaagtctgggtgtacctgtggacaggagagtccaggctaggtgattagagtacacgtaggttcagggctgtctggggcagaagaggatgtgtctgttggtggaggtgcccagctgtctatgccaagcatgaatgcacgggtcaggtgatgtatccctgtagagagcatgtacctatggactaggctgcctgggccaggtgagagtgtacctgtggacaggtgtgtctgggccaggtgaaggtatatctaatttccaggttgaaggtagagtgtacctaatggatgggtgtgtctaggataggcaagggtggcctcgtggttggggcttctagacaaggtgaatgaatgtgtgattgttgagagatgcatctggccaggtgagggtgtatctgacaggtgtgtctgggctacaagtgcatgtttgatggacagctgtgtctgctatacttgagtgtatacctgtgggcaggtgtgtctgtgccgggtaatgatgtacctgtgatggaacagattgatctaggctgggggatagatacctgtgggcaggtgtgcctgggctaggtgaggatatacctgtgatggaacagatggatctaggctgggggatagatacctatggacaggtgtgtctgtgccaggtgagggtatacctgtgatggaacagatggatctaggctgggggatctatgcctgtgggcaggtgcatatgggccaggtgagggtgtacctgtgatggaacagatggatctaggctgggggatatctggctgtgggcaggtgcatctgggccaggtgagggtgccaggctgtagtcagggtcttgctgtgcccacccactagtgcctcaccttgaagcggcggtcgtacttggtgaccgaatcggcgaagtccacccgctccctcttgcccaggaactgacgcagctcgggccgctcctccagccccaggtagtccccgacgaagttccgattgatgctgttgcgcctccgctccttcttgttcagcaggatgttggaagctgcggggacagagggtggagggcagagctcctgatacagctcctccaggtccttgtgcccccaccccgcgccgtttacccgaagcctctcaccttcctcccgcatctcctcgtacttccggacagccacgtggcgccgccaggccttctggatggttcgggcaaagccatcgaactttcgctctcgcacctcctccaggaggaaaagctgggcgggggtcgtggggggcaagggtgagtcctggtgtctccccaggggctgcagttccgggttttccctgcgctcaccctactcacacgcttttgctcacccatccccacacatgtgctaatttttttaagaggcggggtctttctagtgacactcgttcataaagaaaagaagaaaaaggggccgggcgcagtggctcacgcctgtaatcctagcacttcgggaggccgaggcgggtggatcacctgaggtcaggagtttgagacgagcctgaccgacatagtgaaaccccatctctactaaaaatacaaaaagaaattagctgggcatggtggtagatgcctgtgatcccagctactcgggagcctgaggcaggagaatcacttgaacccgggaggcggaggttgcagtgagctgagatcgcgccattgcactccagcctggacaacaagagtgaaactccatctcaaaaagacaaaaaacaaaaacaaaaaaagctggtggctcatgcctataatcccagcgccttgggaggctgaggcgggaagatcgcctgaggtcgggagtttgagaccagcctgatcaacatggagaaaccctgtctttactaaaaacataaaattagccgggcatggtggcacatgcctgtaataccagctactcaggaggctgaggcaggagaatcacttgaacctgggagttggaggttgcggtgagctgagattgtgccattgcactccagcctgggcaacaagagcaaaacttcatctcaaaaaaagaaaaaaagaaaaagacagggtctcgctccgtcgcccagactggagtgtggtggtgcagtcatagctcactgcagcttcaacctcttgggttcaagtgatcctcccacctctgcctcctgagtagctgggactacagctgtgagccaccatgcccagctaattttgtggtgatgtggtcttgccatgttgcccaggctggaaaaatttttatcttcctccaaatgactggacctccctgtgcgtctctccccatgtggggtacacacttctgccttacatgataacagtgagtcactagcttcagatcacagctgtgccacttactacctgtgtgcttttgcaagaaacggtatgatgtcacggtttcttacactgttactcgacactatccacgaggtacactgccgtgtcagagatggtagaaataggaaccagtgtgcatcttggaaaaccaataaaatacagtaaatatgaaaatgtggccgggtgcagtggctcaagcctgtaatcccagcattttgggaggccgaggtgggcggatcacctgaggtcaagagtttgagaccagcctggccaacatggtgaaaccccgtctctactaataatacaaaagttagccgggtgtggtggcgcatgcctgtcatcccagctactcgggaggctgaggcaggagaatcgcttgaactcgggaggtggtggttgcagtgagcggagattgcgccactgcactccagcctgggcgacagagtgagactcagtcccccgacccctgaaaaaagaaaagaatgaaactccatctcaaaaaaaaaaagaaagaaaaagaaaatctgatgtgtagaactgtgatgtgactagcaaccgtgtggttgggcagtgtacaacctgcacagccatccgtagcaggcccagaaaggaagcttttgcagaaagcagagaaaagggttttgagttgtaaaagtctagacccagaggggacttagagaatgaattacattacagcaagtcaaagtacaaagtctaagaggaatgtctactcatttgtaataacagcaggtgaacaaggtgaggaacctactggatattaaaatactgtaaatctatagtaataaaaacaatagcatgcctgtcagagaatagaatgattaactggaatagggcagatgcttgagaaacatcctacttcaaagagaaactgtgatcaaagggacaatattgtcaattagtgaagatgggaaataatgcaaatataggctgggtgcggtggctcatgcctctaatcccagcagtttgggaggctaaggtgggagcattgttgagcccaggagttcaagaccagcctgggcaacatagaaagaccccgtctctacaaaaactaagcaaaaattagctgagggtgatggcacgcatgtgtagtcccagctattccggagggtgaggtgggaggattctttgagcccaggaggttgaggctgcagtgagctgtgattgtgcgactgcactccagcctgggagatagagtgagatcctgtctcagaaaaaaaaaaaaatacacacacacacacacacacacacacacacacacacacacacacacaattgggctttatttagaaaaattagcacttcacccagagtgctttcccaagtccataggtagcacattgctgctaagagccttgctccctgctctgctgaccaaaatagttttaattttttcagagacagggtcttgctctgtttcccaggctggagtgcagtggtgcgatctcggctcccgggctcaagggatcctcccacctcagccactcaaggctaattatggtattattatatatatatttttttggtagagaggtagagttggggttttgccatgttgtccagactcgtctggaactcctgggctcaaggaatctaccagccttgacctcccaaagtgctgggattacaggcgtgagccagcgtgcccagcctcagattcttcttcttcttcttcttcttctttttttttttttttgagacggagtcttgctctgtcgctcaggctggagtgcagtggtgcgatcttggctcactgcaagctccgtctcctgggttcacgccattctcctgcctcagcctcccgagtagctgggactacaggcgcccgccaccatgcctggctaacttttttgtatttttttagtagagacatagttttgctgtgttagccagggtggtctcaatctcctgacctcatgatccgcctgcctcggcctcccaaagtgctgggaattacaggcgtgagccagcacgcttagcctcagattcttctttaaaacctttagagagtatggccatgccaacaccttgattttggacttctgacctgcggaactgtgagagaataaattgctgttgtgttaagccatggagtttgtggaactttgtttcagctgtcccagcagactattataacatacctgggatgctgggccacaaaggccaacaggcagataaaatgtttgaggatggcccaaaccatgttcataagaaaatcaaaataggggccgggcgcggtggctcatgcatataatcccagcactttgggaggctgaggtgggcagatcacttgaggtcaggagaccagcctggccaacagggtgaaaacccatctctattaaaaacacaaaaattagcctggtgtggtggcgggtgcctgtaattccagctacttgggaggctgaggcaggagaattgcttgaaccaggaaggtggaggttgcagtgagccaagattgcgccattccactttagcctgggtgacagagcgagactctgtctaaaaaaaaaaaaaaaaattcatcccaacatgaatgcatttttggttgagaaaggctccaactccattaagctaatttaatttcttgattactttttaaatatagcacagttaaaccgttggctatttttcttttcttttcttttctttttttcagagtctcactttgtcccccaggctggagtgcagtggcgcaatctcagctcactgcaacctctgcctcccaggttcgagcaattctcctgcctcagcctcccaggtagctgggattacaggcacgtgtcaccatgcccggcttattttgtatttttagtagagatggggtttccccatgttggccaggctggtctcgaactcctaacctcaagtgatccaccaccctggcctcccaaagtgctgggattacagttgtgagccaccgtgcctggccttttcttctattttcattttactaatttttttttttttgagatggagtctcactctgttgcccaggctagagtgcagtggtgcgatctcggctcactgcaacctctgcctcctgggtttgagtgattctcctgcctcagcctcctgagtagctgggattacaggtgcgcaccaccacacttggctaattttttgtatttgtagaagagacggggtttcaccatgttggtcgggctggtcttgaactcctgacctcgtgatccactcgcctcggcttcccaaagtgttgagattataggcgtgagccactgcacccagcttattttactaaaattaaattactgttgcccaggcttgagtgcagtggcacgatcttggctcacttcagcctctgcctcctgggttaaagtgattttcctgcctcagcctcctgagtagctggtattacaggtgtgcaccaccacgcccagctaatttttgtacttttaatagagaaggggtttcaccatgttggccaggctggtctcaaactcctgacctcaagtgatccatccacctcagcctcccaaattgctgagattacaggtgtgagccagtgcgcctggccagcaagattattttcatcaggattattttctttcttttataaatattcagtctgtctttgttgttgatgttcttataggattttaccactaagcatctgccatcgtgaatttcattatttctaccccgtccgtcttctccaaatcaaaatctatagactgaaatttttgtctaaattaaattttactttatatagtctttgctggtgatagttatttttcttttttctttttgtcttttgtagagacagggtctcactatgtttcccaggctggtctcgaactcctggcttcaaaccatcctcctgcctcagcctcccaaagcactgatattacaggcatgcgctaccacacctgacttggtgctagttttattttgccttttttctgttctatgtcaaaatttttggtctatttcttccagagtgtctctctcaatctctctctctcaatctctcaatcacattctttctttcttttttttttttgagacggagtctcgctctgtcgcccaggctggagtgcagtggcgtgatctcggctcactgcaacctctgcctcctgggttcaagccattcttctgcctcagcctcctgagtagctgggaccacaggtgcccgccaccatgcccggctaattttttttgtatttttagtagagacgcggtttcactgtgttagccaggatggtctcgatctcctggccttgtgatccgccctcctcagcctcccaaagtgctgggattacaggcatgagccaccgcgcccggcagtcgcagtctttcttaatctctcgctcagtctctctcagtctcttactttcagtctattaatctctcacttgctttctcaatttctctctcaacctctatctcagtttctctgtcaatccctctctctcaatctgtttctcaatttctcaatctatcagtctttctctcaatctctgtctccctctgtctctctctctctctctcagtccctctctatacctttctctctcttcccctctccttctctgcctgtccctcaaacacactcaccgactctgggttcttgacaaagaccttggtgctccccatctggtactggtcgggctccatgttgaccgcccgaagcaggtgctggacgccctggcgttcgtccccacgccaccgcggccacgtctcgggggtcagaatggcatacctgagggcggagggctggggtgtgggagtgctcatagcagacaggcctggctgggcgttctgatgaaggggatggcgagggcgggggtggagggctcctcacctctgcaggaatttggcgaactggcggcggtaggcgaagccggctctgcgcaccctgatgttctccttcaggcccaggtattccacctggtgcttgactctggtggggagggtaggctgagtcccctcggggtggggagtcaccagtcctgggggtgggtgggaggtgctggaggtgggggacctggggggatctggattcatgctgagggaagtttggggggtgagttctgtggtctgggggggcttcgggggtcagcctggggactggggggagggatcttgtcctgatggtcccttctggggtcagttctgcaggtgggggattgtgggaggggctgtgctagtccctgggtcatcctacaggaggtcagggaggtgtctcggtcagttctaggggtaactgcagggcctggggggaatgaatcttggattggttgggggggatcacctgttctcctcccagtctcggggcctcttggtctcgttgggtttgatgcagcggatgtagtggggtgtgcacctcatcagtgtggccaccaggtcgttggcttgtttctgaggcagaagtgaagacgggtgggtggggggcacagagatgggaccctctggcccctcttttttccaccctggatacagtcccaatagacagagactgggggtgggtgagggctggtaacagataagccacaggggccagatgtccctggtctgtgtgcacctccactagtgcacaccacactagtgggactgatgtggggtgtctgcctgaccctggaacccaagacaaggagctctcacgtctaccgcactcaccacttaccttggcacatagtaagtgctcagtaaatgtttgttgactgagtaacagagcccttatgagagcatttctttttgtcctttggggagataggtaccttgggtgtttgttttttttgttttgttctgttttattttgttttgagatggaattttgctctgtcacccaggctggagcgcaatggtgccatcttggctcactgcaacctccaccacctggatccaagagatccttctgcctcagcctcccaagtagctgggattacaggcatgtgccaccacacccggataatttttagtagagacagggttttgccatgttggtcaggctggtcatgaactcctgacctcaggtgatccatccacctctggctcccaaggtgttgggattacaggcatgagccactatacctggctgggtgattttttttgagacagggtctccctctgtcactcaggctggggtatagtggcgccgtgatagttcactgtagcctcagcctcctgtgctcaagcgatcaactgccttagcctccggagtagctaggattacaggtctgagccactgtgcctggctaagacatgtactttggaggtagggaaactgtgtgtatgcctgagaggtttgccttgggttttgcattttgttttatttttatttttatttttatttggagacaaaatctcgctctgttgccaggctggagtgcagtggcatgatctcggctcactgcaacctccgtctcccaggttcaagtgattctcccacctcagccttccgagtagctgccaccacacccagctcctttttttttatatatatatttttagtagagacggggtttcaccatgttggctgggctggtcttcaactcctgacctcaggtgatccacctgcctcagcctcccaaagtcctgggattacaggcttgagccactgtgcctggcttgcatttttattttattttattttagtatttatttattaatttatctgagacagggtcttgctctgtcatccaggctggagtgcagtggctcttggctcactgcaacctccatctcccaagttcaagcaattctcctgcctcagcctcctgagtagctgggattacaggcatatgctggctaaattttgtatttttagtagagatgggctttcaccatgttggccaggctggtcttgaaatcctgacttcaagtgatctgcccgattcagcctctgaaagtgctgggattacaggtgtgagccattgctcccggtctgattttttttttttttttttttaagagacagggtctcactctgttcccaggctaaagtgccagggtgcaatcatggttcactgcagcctcgacctcctgggctcaaatgatcctcctgcctcagcctcccaagtagctgggaccacaggtgtgcactactatgcttggctaatttttaatttattttttatagagacggggtcttgttttgttgcccagactagatttgttgtcacattcatagcaacagaatggtgagtgccagggacttggaaagcagataggcagtgtttcctggggacacagtttcagtttgggaagatgagaaagttctggagatgggtagtggtgatggttgcacaaccatatgaatgcacttaataccactgaacattaaaactggttaaaatattattagataggctgggtacagtggctcacgcctgtaatcccagcactttgggaggctgaggtgggcggatcacctggggtcaggagaccagcctggcccacatggtgaaaccccatctctactgaaaatacaaaattaggccgagcgcggtggctcacacctgtaatcccagcgctttgggaggctgaggcaggcggatcacctgaggtcgggagttcgagaatagcctggccaacatggtgaaaccctgtctctactgaaaatacaaaattagccgggcatggtggtgcatgcctgtaatcccagctacttgggaggctgaggcaggagaatcacttgaacccaagaggcagaggttgtggtgagccgagatcacgccattgcactccagcctaggcaacaagagtgaaactccatctcaaaaaaaaaaccaaaccaacaaaaaaacaaaattagctgggtgtggtggcgcatgcttgtaatcccagctacttaggaggctgaggcagaagaatcacttgaacccaggaggcggaggttgcagagggcccagattgtgccactgcactccatcctgggtgacagagcaagactctgtctcaaaaaaaaaaattattggatattattaagatgataaattttatgtcatgtatattttaccacaaatttaaaaaatggtaaatgactaaagaccaaacaaaaatgtattagaataatggtctacttctgcattgaaggagttgatggagacctccaagaagctggttcaagctccctaaacccagagctggaggaagaccctgctgaacagatgacgtcacagtcagaggcagaagccccaggattggtagacagacagacgttggaatgagagaaacagagtccggaccccaggtagggtggaactcagccctctgcaggcccagctccccgttgtacaccccaggcccaccttgatcttggagccggcggtgctggggcgccccttcttgtctccatccagcttctcggggaagagcatccggaggaaggccctgggtaggaaaggggagaggaggagttggaggtatggctagactttcgggtactcttcctccaggggtggggcagcctcaatgccgcaacgcaaaatatggttctctcaatgtggaggggagctgtgatgggtgagatgcagagggttggttttttggtttgttttttgaggcagggcctcgctttgtcctccaggttggggcgcattggtgcgatgataggaactgcagcctggaactcctgggctcaagccaatgtgtgaatgtattgaatgccactgaattgtacatttcatttcattttatcttattttatttatttatttatttcctttattttttctttgtcacaaaaagggaacaacacggataaattgtacattttaaaatggttaataaggccgggtgcggtggtgcatgcctgtaatcccagcactttgggaggctgaggcaggtggatcacctgaagtcaggagtttgagacaagcctgaccaacatggtgaaaccctgtctctactaaaaatacaaaaattagcggggcatgatggtgggcgtctataatcccagctactcgggaggctgaggcaggagaatcgcttgaacccaggaggtggaggttgcagtgagccgagatcgtgccactgcactccagcctgggcggcagggtgagagacactgtctccaaaaaaaaaaaaaaaaaatcggattgtggtgatggttgcgcaattctgtgaatttgctaaacgtcatggattgagacactgcttaaagtgggtggatttaatggtaagtgctgctgaaacccttacgtgcacatggatccctgggaggcatgggtgcatcctggcttaaagatcaggttaggttccgatagttctaaacctgattgttcagattctgatagttcagaatcagatgcagattctgattctggaggtctggggtggagtttgaggttctgccttttttttcccctcagagataaggtctgttgccaaggctggagtgcagtggtgcaatcacggctcactgtagcctccacctcctaggctcaagtgatccttctatctcagcctcccgagtagctgggactataggcatgtgccaccacacccagctaattaattaattattattatttttgctggcagagtagacaagcatttaaaaaaaagaatttttttttaagagacaggggtcttgctatgttgcccaggctggtcttaaacttgggacctccagtgatccttctggctagggagattctgcactggaaacaaggcccaaggatgctcaggttgctggtctaagaaccacatgtcaaacactttaaggatccccgtcttattactttacatctaatgctatgttctttgtgtgtgtgtgtgtgtgtgtgtttttttttttttttttttttgagacagaatctccctctgtcgcccaggctggagtgcagtggcacaatcttggctcattgcaacctctgcctcctgggttcaagagattcttatgcttccacctcctgagtagctggaattacaggtgcgcgccaccacgcctaggtaatttttataattttagtagagacaaggttttgccatgttgcccaggctggtctcaaactcttggcctcaagagatttgtccacttcggcctcccaaagtgctgggattacaggcgtgagccactgcgcccggcctctggagttactttttacatcagaactagtccatagaaacaccatcctggccgcacagccactcccctcgagtttgtggcgagatggcagttctgggtaagatggagtggggcccggtcctccctccatccccttggggggttgtagccggaggtccccatgcctgggaccactcactgctcactggtctgcatcagctctatgaggtcggagaagagaacgtctcggttcctctcgcagaagccgctgacgtcgtaggagacctggaggggacagtgctgaggacagtgagggactgagaaacctggctgggagggtgggcgtggggtgcttacagcccaggtggtcaaggctttcctggggcctgctgtggggtgagaggatcaggcagtgtctacagcgctggctggggggtatctacagttcagaataggggatggggggcgggcttcctggagagctgatgttcaagttgaggttagaggatcgtggctgtatcccaggtcagaggtaaggggaggtgggggttacaacctagatgagccaggagagagctgcagcttgcatcagaggccggggggcggtgaaagttatagctcagattggtgggtggggggctgcagcctggcgggggggtccctgggagtcagaggtcagattggatatctgtgacctggtcaatcaggggccagtgcagggggcctgtgtcaggagggtaacagccctgtctcagggatctctgggggcatttcagccagggttgggggctggagctgctaccaaaggttagggccctctgtagttctgagcagggcttttgcaaccctggctgagggaacatgggagctccagccgtttttgtttttgtttgtttgcttttttttttttttgagaaagagtcttgctctatcacccaggctggagtgcaatgacacgatctcagctcactgcaacctccgccttccgggatcaagtgattctcctgtctcagcctcccgatgagctgggattacaggcgtgtgccaccacacctggctgatttttttttttatttttaatagagacggggtttcaatatgttagccaggatggtctcgatctcctgaccttgtgatccgcccgcctcagcctcccaaagtgctgggattataggcgtgagccactgcacccggccctgtttgcttttgttttgtgagatggagtcttgctctgttgctcaggctggagtgctgtggcacaatcttggcttactgcaacctccacctcttggattcaagtgattctcctgcctcagcctcctgagtagctgggattacaggtgcccacgaccacgcccggctgatttttgtatttttagtagagactgggtttcaccatgttggccaggctggtcttgaactcctgacctcaggtgatccacccgcctcagcctcccaaagtgctgggattacaggcgtgagccaccactcccagcctctccagcccattttaggggcactcctaggaacttctgctctcatgttgtgagatccttggatcactgcctgagagtgtagtcctgtcttttggggagtggggctgcgggcatggttagagtccagtggatttctgtagccttcggtaggggtctgtaggaggcttcagcacattttgaaggctggtggctcacaggaggggcctgggggctttggggatttcctctccaaattgggatcagaaggtggggggctgtgtcctagtcagggggttatgactcacattggggcttatctgaacataggcagtctggtacccaagctggtgttaatcggggggaattctgttccctctgttaggggagttgatgtgtaagggaagctgtggcctggatcagaggtcagggtttctgcagccctggcccagggaacacggtggtggtggtggtgctggtggtggtggtggtggtgctggtggtggtggtggtggtggtggtggtggtgctggtggtggtggtggtgctggtggtgctggtggtgctggtggtggtggtggtggtggtgctggtggtgctggtggtgctggtggtggtggtgctggtggtgctggtggtggtggtggtggtggtggtggtggtggtggtggtggtggtgctggtggtgctggtggtgctggtggtggtggtggtggtgctggtggtggtggtggtggtggtggtggtggtggtggtggtgctggtggtgctggtggtggtggtggtggtggtgctggtgctggtgctggtggtggtgctggtggtggcggtggcggtggcggtggcggtggcggtggcggtgctggtggtggtggtggtggtggtggtggtgtccagacaagtttggggcttagagagttcctggggggtcagccggaagggtctgtagttctggttagtagggggtggattgaggcgggggacagtggaattctacagccctggataagggtcctagcaggctctttccagcctgggtgctggagggtgggggctacagcctggagccctgggggtctgcgaggaggcacagggtagggtaggggcagggggcgcaccttgccagcgtagtggtggatgacgaagccggcgctccagctgttgaaatgctcgtgggtccccacagccgcctgcagcttctgcagcagtgtctggtctgctcccccgcccgtggcgtgcatggtggcgcacacgtcgtccaagacgctcatgatgcctggggggctctgcggggcgagcgggagccagcagcggctcagtttggtctgccttgcctccccacagctcgtcagtgcagagattaggggagggagggggtggaggagtggagggagctagagctttgggggtggggagggcaccaggggcttcaaatacaagcacaaaaggcgttgcaggggtcagggatggaagggataggggggcaagggtgtgtggggctactgtggaagctcgctgaggtgcagaagtgggtggggacccctcaagagattcaggccccagactagaatcccttggtagggggacctgccttatgtatttatttatttatttagagacggagtcttgctctcttgcccaggctggagagcagtggcgtgatctcagctcactgcagcctccatctcccaggttcgagtgattctcctgcttcagcctcctgagtagctgggattacaggcatgccgccaccatgcccggctaatttttgtattttttagtagagatggggtttcaccatgttggccaggctggtttcgaactcttggcctcaggtgatccacctgccttggcctcccaaagtgctgggattacaggcatgagccaccatgtcccgcctaaatacgtcttaaatttaattttttttgagacagggtcttgttctgttcctcaggctggagtgtggtggtgcaatcatagctcactgcacccttgacttcctgggctcaagtgatcctcccacctcagccttccgggtagctgggattacaggcgcctgccaccacgcctggctaattttttgtatttttagtagagacaggttttcaccatattggtcaggctggtctcgaactcctgacctcaggtgatccgcccaccttggcctcccaaagtgctgggattacaggcgtgagccaccggcatggaatctgcaaatttgactctaactgtgagctggggttcccggggaaatgtttattgaatgattaagtgaaaggtggacaagtaggcggaatgaatggatgaggggcggaagggacattttggttgttatctgtcgctggaagtcctgagtgtagggtagagaagggcctgaggatgccataacacccttggccctccccctcatcttccagactcagctcaggggaccagtgagacgcccccgccaaagttgacccagccctcaccagcttgttttcgatgaggtcacagacgaccttgttgttgaagtactggattggagtccagcggatgccttcctgcacatactcctcctggggtggaaaagggggtggatgtgggggccagtgaaaaagttgtggccacccttccccccatgtcctctccccttctccatctcatcacttaggactgtctctggtaacaaagcccgtcactcctatgtgggcaaggctggaagtgccagggaattacatctggtttcagcagtccttgaccaataatcaacaggagtgggtggataaataccccagctccctcgcttctccgctctatgaagcctcctcgagtcccagtgcagttgcattccggttgtccacagcataacgtgctcattaacacactattttgactctttttttttttttttttttttttttgagatggagtttcactcctgttgcctaggctggagtgcaatggcacgatcttggctcatcgcaacctccgcctcccgagttcaagcgattctcctgcctcagcctcccgagaagctgggattacaggtatgtgccaccacgccggactaattttgtatttttagtagagatggggtttctccatgttggtcaggctggtctcgaactcccaacctcaggacatctgcccacctcggcctcccaaagtgctgggattacaggcatgagccaccgcacacagcttgctttttttttttgagaccgggttttgctctgttacccaggctggaactcagcgatgcgatcctagctcactgcaaccttgacctccagggttcaagtgatcctctcatctcagccttccgagtagctgggaccgtaggagcacaccaccatgcctggctaatttttatgttttttgtagagatgaggtctcactatgttgtccaggctggctttgaacccccaggctcaagcgatcctcttaacttagcctcctagatagctgggactataggtgtgagtgattgtgtctggctcggtctgtctctctctttttttcttttcttttttgagacagggtctcattctgctgttgcccaggctggagtgcaatggcacaatctcgactcactacaagctctgcctcctgggttcaagcaattctcctgcctcagactcctgagtagctgggattacaggtgcccagcaccacacctggctaagttttatatttttagtagagatggggtttcaccatgttggccaggctggtctcaaactcctgacctcaggtgatccacccacctcagcctcccaaagtgctgggattacaggcgtgagccactgcacccagcctctctctctctctttgttaaaaaaatccctgtctcaggactgggcatattaactcatgcctgtagtcccagcactttggcaggccaaggcaggaggattgcttgaggccaggagttcaagaccaatctgggcaacaaagtgaaacaccaactctacaaaaaagttttaaaatattagccaggcatgatggtgtgtgcctgcggtcccagctacttgagaggctgaagtgggaggattgcttgagcccaggaggtgtagactgcagtgacctgtgatcacaccactgcactccagcctggacaacagagcgagttcctgtctcaaaaaaaaaaaaaaaaaaaaaaaagcggggaatggtggctcccatctgtaatcccagcactttgggaggctgaggtgggtggatcacgaggtcaggagtttgagaccagtctggccaatatgatgaaaccctgtctctactaaaaatacaaaaattagctgggcatggtggtgggtgcctgtagtcccagctgctcgggaggctgaggcaggagaatcacttgaactctggaggcggaggttgcagtgagccgagatcatgccactgcactccagcctgggtgacagaacgagactttgtctcaaaaaaaaaaaaaaaaatccctgacttacttcctcagtctcctcttggagcttcctgggattgcctcccagaaaaaccatttgtctctgaatccttgcctcaggctctgcttctgggggaggggcaaaatgaagacagcagggactattgccttattgttcatggctgtgtctccaagcaccctaaacagtacctggcacacaacaggtgctcaataaataattgctgaatgaatgaactaagaggcacggtccttcccaaagctttagaggcagaaggaagtatcactatggagcctgggtaggttggcacagagaggtgggaacgcggtggggagggctggggtgtcccctagttgctaagggatcctcatggtccttccaccccacccccaccccaggatcccccatccctgactgcttggccgcccacctgctcggccttcagggtaagttcgataaagatttgctgcagcttctcattgacgaagttgatgcaaaactgctcgaagccatttttctgcagaaggaggaaaagggtccttccctcaatgtcctggtgctggaagttcttgtggccaccctgggctgccccagggaggacaggatgtgggctggaggcagggggccgtacctggaagatctcgaagccgtaaatgtccagcacaccgatgctgtactcttcctggggtttctgcatagcacggttgatggcctgcggtgtgggtggggacaggaagtcagtgggcatcggtcagatctgaagcccctgcccaccactccttagacacacgcctagccaacttcatgggtgatgtcccctcatgccagtttccctccagccctctttagctctgcccttcctggctctgtgtacagtctccccaccccataatcagtcactcagaggagaaacccaagtgtcagtgtatcagggtccctgactccagagctgactctgcccctgaacctctctgcacctctattttctttttttttttttcttttttttttttgagacggagtctcactctgtcgcccaggctggagtgcagtggcatgatctcggctcactgcaagctccgcctccagggttcacaccattctcctgcctcagcctcccaagtagctggaactacaagggcctgccaccacgcccggctaattttttgtatttttagtagagacggggtttcactgtggtctcgatctcctgacctcgtgatccgcccgcctcggcctcccaaagtgccgggattacaggtgtgagccactgcgcccggccttgcacctctattttcttatctttaaaaggggttgataatagcaactaccttatggggctttttcttttctattttttttgagatggagtctcattctgttgcccaggctggaatgccagtggcgcaatctcggctcactgaaacctctgcctccaggattcaagagattcttctgcctcagcctcccaagtagctgggattacaggcatgcgccaccacgcccggctaattcttgtatttttagtagagacggggttttgccatgctggccagggctgatcttgaactcctgaccttgggtgatctgcccgctttgacctcccaaagtgctgggattacaggcatgagccactgcacctggccatacattttatactttatttatttttattttttattttgagacagggtctcagtctgttgtccaggctggagtgtagtggcttgatcatggctcactacagcctcaacctcctggggtcagggattcttccacctcagcctcctgagtagccgggattacaggcaccagccaccatgcccggctaatttttgtatttttgtagagacagggttttgccatgttgcccaggctgactccatacattaaaaaagtttttattttatttatttatttattttgagacagagtctctctctgttgcccaggctggaatacaatagcacgatctcagctcactgcaacctccacctcccaggttcaagtgattctcctccctcagcctcccaagtagctgggattaaaggcatgtgccaccactcccgggtaatttttagtagagagggggtttcaccatgttggccaggctggtctcaaactccagacctcaagtgatccatccacctcagcctcccaaagtgctgggattacaggcatgagccactgcatctggccaaaagttttttttagagacagggtcttgctctgtcacccaggctggagtacaatagcgcaatcatagctcactgcagccccaacctcctgggttcaaatgatcccccaacctcagccctctgagtagccagaactacacatgcacaccactacacccaactaatttgaaatttctgtagagatgggggtcttgctatgttgcccaggctggtcttgaacttctggcctcaaagaatgctcccaactcagccacccaaagcattgggattgcagccgtgagccactgcactcagcttccataaatgtttgtgaccccagagcatccactctgccttccagccccagccccactcgcctccacgaggaagtcgaagaggcgggcatagagccccttggccagggcatcacgggtgtaggctgcctgctccacgttgagggtcacattgatggactcgctgcgcccgccccagcggctgtccatcttgcggctggtcagcttctcctgcagtcgcccgctgtcaatgcccagcaggtaggcgggaaaggccaggactaccagggcaaaggtcagggcaaaaatgggacagttggttgggctcttgtgcctcctgcatgggcctcctattatccccatcttgcccagtgacacccacatttttttcctcgtgggctttcagcttcctgggggctgagctaggaggacgcagttcacccacccacaggcctccatccagccctccctgatacccacactcacggtccacactctccactcgggcgtaattcccgtcttcacagaaactgatgttccccaggtgcaagatccccgccacgagctgcaggaccagctgctggatgctgggcgggatcccaataacctgcatagcactctgtggtacaacgggggcagaaactgtgccgtgaatcctggcctccaacctgcctccaggggcaggcttgagggaccacagcacggactcagggagtgagcacccttgggtccctgtcctacccctttcagtcacttgccgcgtgaccttgggtaagtgcctgcacctctctgggctttgttttttattatattttttatttttgagacagagtctccctctgttgcccaggctggagtgcagtggtatgatcttggctcactgcaacctcctcatcccaggttcaagcgattttcctgcctccgcctcccgagtagctgggattacaggcgtgagcgtcgtgtccggactgggctttggtttcctatttttttttttttagagtctcactctttcacccaggcgggagtgcagcggcgctatcttggctcactgcaacctccacctcccgggtttaagcgattctcctgcctcagcctccctagtagctgggactacaggcgcatggcatcatacccggctaatctttgtattcttaataaagatggggtttcactatgttggccaggctggtcttgaactcctgacctcaggtgatctacctgcctcggcctcccaaagtgctgggattacaggtgtgagccaccgtgcctggccttttttttttttttttttgagatgtagtctcactctgttgcccaggctggagtgcagtagtgtgatctcggctcactgcaacttccacctcccgttttcaagcaattttcctgcctctgcctccccagtagctgggattacagtcacacgccaccacatctggctaatttttgtattttaagtagagacggggtttaaccacgttggccaggccggtcttaaactcctgaccttaagtgatctacctgcctcggcctcccaaagtgctgggattacaggcttgagccacatgcctggcctgggcttcggtttcctaatttgtaactcaggagggtttctggggctgaggtctgcctggccggggactggagtagaggccggtgctcaccagagtctcaccaaagtcgcttctgtcgtccgtgccgtccacctggtaggtgtccgattggttgaggtagtaatagtagtccggtgtcatgaggcccaggttctgcctttgctcctgggaggccccttccagcagctggagggtgtgccatgttcatgcatctggtgcttgcctggctcagcccctgtgatccctcatctgccctgccatgcccccctaggtgtttaccttcccattgtccaccccgctgggctccaggtggtgctccctctcccccggccccttccctgcacctggtagtagatgtggaagttcctctcattttcattttgcatgaccacgcgggacttctccagcaagaagttggagatcttgcccccatctggctccccacctcggctgaactggatctcaaagtacttgccctgaatccgagagaaccatgtcagcaccccagtgtcctggggtgcaggtgggggaagggttggggatgggtcttatgagccttgcctctcttcccttcttccttttttttttgagacagaatctgactctgttgctcaggctgggattcagtggcgcaatgtcggctcactgcaacgtccacctcctgggttcaagtgattctcctgccttagcctcctgagtagctgggactacaggcacccgccaccatgcccagctaatttttgtatttttggcagagctaatttttgtatttttcatcatgttggccaggctggtcttgaactccagacctcaagtgatccgcctgtctcagcctcccaaagtgctgggatttcagatgtgagcccccacacccagcccaagggtatggaatttattaaaccatgtccatgtgcaggtgtaatactgaagtctatgagatggatattaacatcgtcaccattttatggatgagcaaacagaggaaactcaggaagttgcatagatttttttcccccccaggctacacagctcacagtgatagaatcaaaccctgaatccatatctgtttacctatcctgactttcactgggcccagcgcagcacccacacaaagaacgagtcccagaactattgtcgaaagaaggaatggatgagggaataaattggacctgaaatgtgaatgggaacaatgtagcatggctgcagccgggggagcatttaagaatgttacacaggggtgtcatggcctccacagttctgccaatgggggactctcttttgaaagggaccatgagcaggaagtgagtctccccttcaggagtaggtatttcctgctgggttttcaatggactcttgtcttggcaatacgggtgtgtgtatgtgtgggtgtgtgtgtagaaaggtcagcacggagggagcagctgctccaagcaggtctgcagagacttacaaagcggctggaattgttgttgcgcacagtcttggcgttgccgaaggcctcgagcagcgggttggactgcaggatgatatctttgacgtgctggggcagaggcaggtggagtgggaagaagtcagactgaggcaggagtgcagatgggtggggctgcactaccatgcaggtgagggcgacccagcttatccttctgttttcctcgtctcacctggaccttctcgcctccgccagacaccttggagatgtagcccatgatatatttggctgccactgtcttcccagctccactctctccactggggatgaatggaggaataaatgatcagtggttggggaagagccctttttagtgcctgaccattcattcattgagcacctactgtgtgcctgccagtattccgggtactggggatactgtaatgaacaagacagataaaatctctgctctcagccgggcatggtggctcctgcctgtaatcccagcactttgggagcctgaggagggcggatcacttgaggtcaaaagttagagaccagcctggccaacatggtgaaacccagtctctactaaaatacaaaaattagccggacatggtggtgggcgcctgtaatcccggccactcaggaggctgaggcaggagaattgcttgaacctgggaggcagaggttgcagtgagctgaggttgtgccactgcactccagcctgggtgacagactgagactctgtcacacacacacacacacacacacacactctctctctctctctctctctctctctcgctctctttctctctctctgctctcatagagctggcatcgattgattgactgagatggggtctcactctgttgcccaggctggagtgcagtggtgtgatcatagcacctgttcctgcctggaactcctgggctcaagcaatcctccctcctcagcctcttgagtagctggggactacaggcgtgcaccaccgtgtccggctaattattatctatacagagacaggatgttgccatattgcccaggctggtcttgaactcctagcctcaagagatcctctcgccttggcctcccaaagtgccaggattacaagcatgagccactacacctggcctgaggtgacatttagaggggacagacagacaatagcagaatgaatcaataaaatacatcgtgagtcagatggtgacaaggaaaataaaacagagtgagggcagagagggacagcagggcaatgttcagattgggagtttcaggcaaacctccctgggggtggtgatgtttcagcaggggcccgggcagcagggtctgtggccccccaactctgtccatacctaatgatgacacactggttctcacagtcgataagcatgttccggtacatgttgtccgtgagggcgtagatgtgcgggggattctcatactgggcctggcaggggaggtcaggtctcagcccagggctgggggccaggagtctgggggctgtgcctcccacccagccccagcctcaccgcgccctgatagaggtcgatctcacggtcggtgaagtagggcatctgcttgaaggggtttacagagatgagcacagagccgatgtaggtctgagggatggttaagggtcgtgtggtgtcctggtaggttttgtcctccctgtcccctcatcctgcccccacccagggcttcctaaaactccattgcttggaggtggaagagatggagataatggatgcacctcgagtctcttggaaaaaacagggctggccgggcgcggtggctcatgcctgtaatcccagcactttggaaggccgaggcaggcggatcacttgaggtcaggagtttgagaccagcctggccaacatggtgaaaccttgtctccactaataatacaaaaaattacccgggcatggtggtgcatgcctgtaatcccggctacttgggaggctgagggaggagaatcgcttgaacctgggaggcagaggttgcagcgagctatcgtgccattgcactccagcctgggcaacaagagccactcagtctcaaaaacaaaacacaaaacacaaaaagcaaaaacaaaaaaattagccaggcatggtggcgcatgcctataatcccagctacttgggaggctgaggcaggagaatcatttgaatccgggaggtggaggttgcagtgagctgagattgtgccactacactccagcctggaacctgggcgacagagcaagactccgtctcaaaaaaaaaaaaaaaaaaaaaaaaaaaaaagaacaaacagggttggatccggaatgggggaaatggaacacgctggggctgagcttccccaggacagagggagcagtggcagccacagctgcccccaaccagagccctgctgtcactctgtctgtcctctgtgtcaccacttggtgctctcccggcccattcctccctctgctccttcaccctcctctccgtccatggcccagccattcattccttccctgcctgcccacccccagccttggcccagggtacgaagatgtagtcgtccatgaagcgcttccggaggttggcggcaatggcgtcttcggtgatctggggaagaagcaccatgtcatccacgccgctctgcttcacgttgtggctctgccagtggaagcgctccttgctgccctggggggtgagaggggggtcggggtgagcccttgcacggggatgcggcacctggctcaccgacgctatcagcttctgggttctgtcccacctcccccgccccacctccattcctccttccccatctccaggagaggctggcagggtccaagccaggccccctgccccagacagaagttgcactgctcggatccagccctcagccctctatttttttttaatttttaatttttatttatttatttattttgagacagagtctcactctgtcagtcaggctggggtgcagtggcgtgatctctgctcactgcaacatccacctcccgggttcaagcgattctcctgcctcagcctcccgagtagctgggattacaggtgcccaccaccatgcccggctaatttttaatatttttggtagagatggggtttcaccatgttggccaggctggtctggaactcctgacttcaagtgatccacccgcctcaggctcccaaagtgctgggattacaggcgtgagccaccgcacccggcctcttttttttttaattaaaaaattttttaatgccaagtgcagtggctcatgcccgtaatcccagcacttcgggaggttgaggcaggaggatcgcttgaggccaggagttcgagaccagcctgggcaacatagcgaggccccgtctctataaaaaaagaaagaaagaaagaaagaaagagaaagaaagagaaagaaagaaagaaatgagatctcaagccatgaaaagacatggaggaaacttaaaggcatatcactaagtgaaagaagccaatctggggccgggcacagtggctcatgcctgtaatcccagcactttgggaggccaagacgggtggatcacctgaggacgagagttcgagaccagtctgatcaatatggagaaaccccgtctatactaaaaatacaaaattagccaggtgtgctggcacatgcctgttatcccagctactcgggaggctgaggcaggagaatcgcttgaacctgggagacagaggttgcagtgagccgagattgtgccattgcactccagccttggcaacaagagtgaaactctgtctcaaaaaaaaaaaaaaaaaaaaaaaggaagccaatctgaaaaggctatttactgtcttattccaactataggatattctggaaaaggcaaaactatgaggacagtaaaagatcagtggggccagacgcaatggctcacacctgtaatcccagcactttgggaggccgaggcgggaggactgcttaaggccagcagttcaagaccagcctgggcaacatagtgagacccccatctctacaaaaaatagaaaaattagacgagtggtggcatgtgtctgtgatcatagctactctggaagctgaggtgggaggatcacttgagcccaggatgtggaggttgcagtgagctgatatttcgccactacactccatcctggatgactctgtctcaaaaaaaacaaacaaccaaacaaacaacaaaaaaagttttgagacagggtctcactctgtcacccaggctggagtgcagtggtgtgatcacagctccatgcagcctcaacctcctgggctcaagcaatccttccaccacaccacagcctcctgggtagctgggactacagacgtgcaccaccatgcctggataatttttgtatttttttgtagagatggggtcttgctatgttgccctggctggtcttgaactcctgggctgaatggattatctgtctcagtcccccaaagtggtgggattataggcgtaagctactgcacccagcccctcagccctctcctttggtctctctttccatctgtcactccacctagtacccctcacttcccatgaaggatgccaggcttggcgggcagggcacagagtgcttggggttctgcaggctgtaggagcagagcagggagaccgggtgacttggtgggaagtgggcgcatcccagttctcacttcctgccagcctcccagcctctccctttcacatcccccgtcccctccccaggcccaggccagtccctgacttctctgtggcatttgatccactgctgccaggccccttccttctccctcctacctctcctcttctcttgtggtcacacataccagctggtccctttgagctcctccaggccaccatgtgctgtgacctctgccctctgtgcctgtgtatgactttgttcctcagctctaccctctactcccagccctgcctccctgctgcccctgccgtggccttctcctctgtgtcccttcaccttgcccctcagcagtgccagcaccttcttaggttgccatttttttcatttcatttcctctctcagtttttctttttcttttctttttttcttttgagtcagagtcttgttctgtcacccaggctggagtgcagtggcgggatcatagctcactgtagccctgaccttctgggctcaagagatcctcccacctcagcctcctgagtagctgggaccacaggtgtgtgccaccatgcccagctaatatttaaattttttttgtattgatggggtcttgctctgttgctcaggctggtctttaacttctggcctcaagtgatcctcccacctcagcctcccaaagtgctggaatttcaggcatgagacaccttgcctgacccagacgacactttctttaggccccatggaggagactgaggcacatgctctccaaaatctcctcttccaggaagcctgccctggttgctctccttttagcccgactgaatttatctagtgccttaaacaccctggctttctcaggctcactctgtctctattcaacacatctctgcaaaggagtagtctgacagataggagtgatggcaacttggagctaccccatttggtgaactgatggtcagataagatgtctctcctcctggaagccccccatccccaggccaggagctcctggagacagagactggggctgagtcttttctctgtcaaatgaacaggggacaaaggtaaagaaagaaacccagattcagagcaaaaaccaccagagcaaacaaagctgggaattgaagtatttttgtatttttgagatggggtctcactgctttgcccaggctggatggagtgcagtggtgagaccacggctcactgctacctctgcctgcggggctcaagcgagcctgtcacctcggcctcctgagtagctggcactacaggcacacaccactaagcccagctaattttttgtatttttggtagagacggggtttcactgtgttgctcaggctggtcttgaactcctgagttcaagcgaccttcctgcctcgatcttccaaactgctgggattacaggcatgagccaccgctcccagcccaggattgaagtctttaaagtggactgtgtttgccagtggattccagggatacaggcagggcacaagcagaagtgtccacgtgggcaactgtaaggcagaagtggagccagtctctcctgggggtactggggagccacggaatgttcttgagggggtggggggtggggggtgggggtggaggtgcatgatcagattctggacatactgacagttagaggttgttgagggatgcccatgggcattaaataagcccagcctttggcataagggtagatctgggttctgatcctgactgggcaaacagatgctgctgtgagtctccatcgtctcatctataaaaaggaagaggcagctccacttcccagggttgatgagaggatgaactactctgggggaacaaggtgggatgggaggctggtgcccctccccaagcctgagtggtcgtgaggatagaccgaggctgaggggcatttgaaagaattaacacgaccgggcgcggtggctcacacctgcaatcccagcactttgggaggccgaggcggggagatcatctaaggtcgggagtttgagaccagcctgaccaacatggtgaaactccatctctactaaaaatacaaaaattagctgggcgtggtggcgcacgcctgtaatcccagctactcgggaggctgaggcaggagaatcgctagaacccaggaggcggaggttgcggtgagcccagattgtgccattgcactccagcctgggcaacaagagcaaaactccatctcagaaaaaaaaaaaaaaaaaaagtaaagaattaacactcagcgagcacctatgctgtgcctggtttgggggatgtagatggttgatactggcagccatcatcacaccatctcagtgtgggtaggctcgaagggaaacggaggctggagaagtacagcagcttccttaaggacacgggactaaagatacaggtattgtttccaagggtgtggggtttgaacctgggtctattcaacagcaaagaacaggttcttggctgggcgcggtggctcacgcctgtaatcccagcactttgggaggctgaggcgggcggatcatgaggtcaggagatcgagaccatcctggctaacatggtgaaaccccatctctactaaaaatacaaaaaaagtagccgggtgtgggggtgcgcgcctgtaatcccagctactcaggaggctgaggcaggagactcgcttgatcccgggaggcagaggttgcagtgagccgagattgcaccattgcactccaacctgggcaaacatagcgagacttggtcttaaaaaaaggaaaaaaaaaaaagaacaggttcttgcctctgtctacacgcacaggaggctgggctggtgctgagaaggatttttttgttttgttttggtttggtttttgagacagggtctcactctgtctcccaggctggagtgcagtggcaaggtcatggctcactgcagccttgacctcctgggctcaagtgatcctcctggtctcagcctcctgtgtagctgagactacaggcacatgccaccacgcctggctaattttttttttttttgagacagagtcttgctctgtcgcccaggctggagcgcagtggcacgatctcggctcactgcaagctctgtctcctgtgttcacgccattctcctgcctcagcctcccgagtagctgggactacaggcgcccgccaccacggcggctaattttttgtatttttggtagagacggggtttcactgtattagccaggatggtctcaatctcctgaccttgtgatctgcccgcctcggcctcccaaagtgctgggattataggtgtgagccactgcgcctggccacgcctggctaatttttaaatatttcatagagacatggtcttgctctgttgctcaggctgatgtctataactcctgggctcaagtgatcctcccaccttggccttccaaaatgctgggattacaggtgtgagccactgtgcctggcctgagaagggttttgataaacagctgggagaaagggtgcaccagtcagggttaactgtctggggaaaggtgtggaggtgtggctgcagcagggacagagaatggaatgcaggggtagtcagggcttcaacccctcacactgctcctggcctgagtagtcagcatgaattccctccctccctccctccctccctcccttccccccttctttccttccttcctttctcctctccctcccttcctttctcctctccctcccttccttcctccctctctccctctctctctctttctttttctctttctttcgttctctttcttctctctcattcttctctctttctctcttctttcttcctctttctttccctccctcccctcctctccctccttccttccttccctccctccctctcttctcttttttctttctctctttctttcttctttctttccttctttccttccattttttctttccttctttcctttcttcccttcccttttccttccttccttcctcctttttttctatctttttttttgtttgtttgagatggagtctcgctctgttggccaggctggagtgtagtggcgcgatcttggctcactgcaaaatctacctcccaggttcaaacgattcttctgcctcagcctcccgggcagctgggactataggcgcgcaccaccacacccggctaatttttgtatttttagtagagataaggtttcaccatattggccaggctggtcttgaactcctgacctcgtgatccacccatgtcggcctcccaaagtgctgggattacaggcatgagccactgcgtctggcccttccttcctttttctttttttttcttttgttttttttgagatggagtcttgctctgtcgcccaggctgaagggcagtggcacaatctcggctcactgcaagcctcgcctccagggttcacgccgttctcctgcccggctaattttttctttttttttttgtatttttagtggagacgaggtttcaccgtgttagccaggatggtcttgatctcctgacctcgttacccgcccgccttggcctcacaaagcactgggattataggcatgagccaccgcaccggcccttcctttctttttcttgtcttttttgagacaagatctcactctgtcacctaggctggagtgcactggtgcgatcatacctcactgcggcctcgaactcctgggcccaagcaatcctcctgccttgacctcctgagtagctgggcctatgggtggaagccactgggcccagctgggagattttagttttgttcagtgtgctaagagctcaacactttgtttattttaaaaatttatttacttatttatttttttgaggcagggtcttgctctgttgcccaggctggagtgcagtggtgtaatcatagctaactgtagccttgacgtccaggctcaagtgatcctcccaccccagcctcctgagtagctgggaccacaggcaagtaccactgtgcccagctacttaaattttttttttacagatggggtctccctatgttgcccaggctggtctctaactcctgggctcaagcaatcctcctgcctcagtctcccagagtgccaggattacaggcatgagccatggtgcctggccaagttaaacattttggaaactcacttcgttgaaagtcatgccggtggtggcgttaaaaatgacctgtaggtgggactgtcatacttgtttacaggtgggagcacctggtggctctcctgggccttcttggaccgctgaccttagcaccttctttccttctttcctttttttgttttgataccgagtctcactctgtcgcccaggctggagtgcagtggtttgatcgcagctcactgtaacctctgcctcccgggtccaagtgattgtcctgtctcagcctcccgagtagctgggactacaggcacctgccaccatgcctggctaattttttgtatttttagtatggatggggtttcaccatgttggtcaggctggtcttgaactcctgacctcaggtgatccacccgcctcggcctcccaaaatgctgggattataggcatgagccactgtgcttggccactttttttttttttttttttttgagacacagtcttgctctatcgcccaggctggagtgcagtggtgagatctcagctcactgcaacctctgcttcccggattcaagcgattctcatgcctcagcctcctgagtacctgggattataggcgtgcaccaccacgcccagctaacgttttgtaattttagtagagacaggatttttctttttctttctttctttcttttttttttgagatggagtgtctctcttgttatctgggctggagtgcaatgatgtgatctcagctcactgcaaccttcgcctcccgggttcaagcgattttcctgcctcagcctccctagtagctggggttacaggagcccatcaacacgcccagctaattttttttgtatttttagtagagatgggctttcactatgttggtcaggctggtctggaactcctgacctcaggcgatccccctgcctcagcctcccaaagtgctgggattacaggggtgagccaccgcgcctggcttgagacagggtttttctatgttggccaggctggtctcaaactcctagcctcaggtgatccacccgccttggcttctcaaagtgctgagattataggcatgagccactgcgctttggcctgaccctagcactctcatatttggacacacattttattgtaaggtcttcattacaggcaatcacattgattctttttgaaactatgggagttgagtgtgtccattgtctgaggttaatgtcgggatttaaaggaggcctaattaggtgtttttataagaagtgggtgctggccgggcatggcggctcatgcctataatcccagcactttgggaggccaaggtggatggatcacttgaggtcaggagttcgagaccagcctggccaacatggtgaaaccccgtctctactaaaaatacaaaaattagccaggcgtggtgtcaggcgcctgtaatcccagctacttgggaggctgaggcaggagaatcgcttgaacccaggaggcagaggttgcagtgagccaagatcatgccattgcacttcagcctgggcgacaggagtgaaaccctgtcttgaaaacaacaaaaaaagaaggaggtgctgactgggatgcactgagagtccctggggtgcgtcaggagatgacagaatcctggggagcagtggcatggaggggttgaagttgacacccaccacagactggctgagtaggaactgccagggaagtcagaggcaaaacccggaccaggcaggggaggcccagatgggacgagggtgggttaggagccatcgactcaaccctgaagagcgtctgagctcactggagactaagaggggccccagggtcagaagcaggattgggaggctaggaggtatagacaggaatgaggatctggctgagaaggggaagagggagagaggctgtgggggagaagtggggtcaggggagcccgtgtttcctgttttttttttgttgttgttttgagacagagtctcgctctgtcacccaggctggagtgcagtggtatgatttcggctcactgcaacctccgcctcccgggttcaagtgattctcctgcctcagcctcccaagtaactggaattacaggcgcctgccaccaagccaggctgatttttgtgtttttagtagagacaggatttcaccacgttggacacgctcatctcgaactcccaacctcaggtgatccgcccacctcagcctcccactgtgctgggattacaggcatgagccactgtgtccggccagagacagggatttcaccatgttggccaggctggtctgtaactcctgacctcaagttcaagtgatccacccacctcagcctcccaaagtgctgggagtacaggcgtgagccaccacgcctggctcatttcattttcaagatggggagaccagatggttgatgagaagagacaataaaaattgtgggcaggttgggtgcagtagctcacgcctgtaatcccagcactttgggaggttgactcgggcagatcaactgaggttgggagtttgagaccagcctgaccaacgtggggaaaccccgtctccactaaaagtacaacattagccaggtgtggtggcgagcgcctgtaatcccagctactcgggaggctgaggcaggagaatagcttgaacctgggaggcagaggttgtagtgagccaagattgtgccattgcaagctagcctgggcaacaagtgcgaaactctgtctcgaaataataataataataaaaattaaaaaataaataattgtgggcaaagtggcatcattcatgggcctagtggggcaggagcagggtcgtgagtggtgagggtctgttctttttctaaacaggtatttggggagaggctggggacaggcacagctgtgtcagtgggtggggacacgggaagtgcattttgtctctgaagagcttaagggtggagattggatggaaataacaacaatagaaaacaatgacaacaacagttaacacctggccgggtggtggctcacacctgtcatcccagcactttgggaggctgaggtggaaggatcacttgaggccaggtgtttgagaccagcctgggcaacatagtgagacccccatctctgcaaaaaaaaataaaaaataaaaaataaataaaaattagccaggcatggtggtatgcgcctgtagtcccagccactcaggaggctgaggcaagaggatcacttgagcccaggagttcggagttacagtgagctgtgattgtggcagcactccagcctggatgacagacgaagacccagaaaaaaaacccaaacaccaaactagcacttattctgtgtaccaggctccagtctatgtcttttttttttttttttttttttttgagatggagtcttgctttctcgcccaggctggagtgcagtggcatgatctcggctcactgcaagctctgcctcccgggttcacgccattctcctgcctcagcctcccatgtagctgggactacaggctcccacggccatgcccagctaattttttgtatttttagtagagatgggctttcaccgtgttagccaggatggtctcgagctcctgatctcatgatccacccgcctcggcctcccaaagtgctgggattacaggcgtgagccaccgcgcccggcctggtctatgctttttaaaaaaaattttatttttatttatttaatttaattaatttatttatttttgaaacagagtgttgctctttcgccctggctggagtgcagtggcatgatcttggctcactgcaacctctgcctccctggctcaagcgattctcctgcctcagtttcccaagtagctgggattacaggtgcatgccaccatgcccaggtaatatttgtattttttgtagagatggggtttcaccatgttggccaagctggtttcgaactcctgacctcaagtgatccacccgcctcagcctcccaaagtgctgggattacaagcatgagccaccataactggcctttatttattttaatatatatattaaataatatatgtttacaaacagagatagagtctcgctatgttgcctaggctggtcttgaactcctgaatttcaagtaatcctcttgcttcagcctatgaaagtgctaggattacaggcgtaagccaccaggccaagcctggtctaagctttttatgtgaattacttcatcttatcctttcaacacacgctggctgaggttagtcctatcactgggtccaatttttttttttttttttttttgagattgagtcttgctctgtcgcccaggctggaatgcagtggtacgactttggcttactgcaacctccgtctcccaggttcaagcaattccaattctctgcctcatcctctcgagtagctgggattataggcacccaccaccaagcctgctaatttttgtatttttagtagagatgggggtttcaccatcttggccaggctggtcttgaactcctgaccttgtgatccacctgcctcggcctcccaaagtgctgaaattacaggcatgagccaccgtgcccggcccactgggtctatttttttttgagacaaagtcttgctctgttgcacccaggctggagtgcagtggcacgatctcagctcactgcaacctccacctcctgggttcaagcgattctcctgcctcagcctcttgagtagctgggattacaggcgcctggctgatttttgtatttttagtagagacaaggttttaccgcgttgggcacgctcatctcgaactcccaacctcaggtgatcctcccacctcggcctcgcaaagtgctgggattataggcgtgagccaccgcacccatcctgggtccattttatagaagagaaaactacagcacagagaggttaagtgtcctcttcaaggacacacagcagtgcagagaggaccttggggaggacccacgaagctgtccttccccaggctggtctgtatcagagatcgccggggttgctgctgaggtcagatgaggatgggttggggagaagatgggtcatgtctacaatttcccctttgggggccagtgcaggcttcagcctgccaggccactcaggctgaactaagaccccaggccacttcccctcactggggtcagctgtgtctggctaggcccatcagccctcctggctctcccggctctgacgacttggttcctcttcctgcccttcccctctttcctcatctggcagagtggccctcttctctgaccattctctccctctctatcctgccccaggcactagaggccctcagacactccatgctccagccacctgtaaaatcacaggctgggccgggcacggtggctcacacctgtgatcccagcactttgggaggccgaggtgggtggatcacgaggtcaggagatcgagactatcctggctaacacggtgaaaccccgtctctactaaaactacaaaaaattagccaggtgcggtggcgggcgcccgtagtcccagctcctcgggaggctgaggcaggagaatggcgtgaacctgggaggcggagcttgcagtgagctgagatggtgccactgcagtccggcctgggtgaaagagtgagactccgtctcaaaaaaaaaaaaaaaaaaaaaaattaatcacaggctgtttgcatcgaagggagagagggttttgctcaagtgaatatcgtgtggggaggatagtcgagaattttggcatgtgatggattggggtcaaagcctggcttgacagttgactgactgtgtgactctggggaggtcacttctcttctccaagcctcagtttctcctctttgcaagtggatttggccgcgcatggtggctcacgcctgtaatcccagcacttttggaggcgaggcaggcagatcacttgaggtcaggagttcaagaccagcctggccaacatggtgaaacctcatctctactaaaaatacaaaaattagcccggcgtggtggcgggtgtctgtagtcttagctatccgggaggctgaggcaggggaattgcttgaacctaggaggtggaggttgcagtgagccaagattacgtcattgcactccagcctgggcaacagagcgagactccatctcaacaacaacaaataaccaaatggattccataatgacccttgtgtggggtctctgaaacaagtacaggagcgaacaaagagaaaaaatgcgccgagatgcctcaggaaatgtcatctgtgaccttgagaggatttaaggcatcagtgttggacagaaagcctggtcaatacatacttgttgaatgaatgaatgaatgaatgaagtcctattgggatgagactgccccctgccctgtctcccagatatctctctcattctgtggcctccaagtctccatgggtcaagtcaaaactgtttgtttgtaagtctcttccttgggggtggggatgcaacgaagagcttgtggtcacagttgaccacaagctgaatatgactcaacctgctggagctcttgtgaaaggcagtcaggggcttgaggtgggtggggtaggaaggacgggtagcttcttccttcagctcttcagagaggtctctctaccccaaggctgaaggcagaactagggcaggcggggacaaccttcctggtatcacaccagggaggggctgtttgtggtgaaggtgatggtgcctatggggctgggggatgtgtgccatggagggaacacacttcctgggcccctactgtgcatggaggtaggtggagaccaggcttaggtggaccaggcccagaacctgcccttggggggctcggtgttccccaagtggtgtctcagttgcccagaggagaccatggctggaaagtactgtggagaggtgagagggcttcctgtagaaggcacgtcttgcaacatgaactttccaggcagcatcagtggtggctgcaagagacatcagccagagaggccttgggtgtgtggtggacaccaggattctagtctgtttggaatggagggtcatggtcctggagggatagacagcccaggccatgtggggtcagcacatagtcctgctggcctctcattgcttaggaggacaggaggctgtggtcaaggtgcctgttattttttttggacagagtcttgttctgttgcccaggttggaaggcagtggtttgatatcactgcagccttgacctcccaggctcaagcgaatcctcctgcctcagcctcctgagtagctgggaccacaggtgcatactaccacgcctggctaatacatttttttttttttgagatggagtcttgctctgttgttcaggctggagtgcagcggcatgatctaggcttactgcaacctctgcctcccaggttcaagtgattctcctgcctcagcctcccaagtagctgggattacaggcgtgcacaacgcctggctaatttttgtatttttagtagagaccaggtttcatcatgttggccaggctggtctcgaactcctgacctcaggcaatccactcatctcggcctcccaaagtgctgggattataggcgtgagccactgcacccagccacatttttttttttatttgagatggagtctcgctcttgttgctcagtctgtgagtgcagtggcatgaccttggctcaacctctgcctcccaggttcaagcaattctcctgccttagcctcctgagtagctgggattacaggtgcacgccaccacacctggctaatttttgtgtttttagtagagacagggtttcaccacgttggccaggctggtcttgaactcctgaccccaagtgatctgcccgccttgacctcccaaagtgctggaatgacgggcactgggatgagccaccgcacccaaccacatttttttttttttaaatagagacaaagtctaactatgttgcttaggctggtctcaaactcctggactgctgatcctcttgccttggcctcccaaagcgctggaattacaggtgcaagccgctgtgcccggccaagatggctgttaatagtgtggccttgggagtcactgagtcaaaatcctctttcattttagattgggcagctcacctaacctctctgcctcagtttcctcattcggaaaatgggaacatcgaggggtgcaaatctcacaggctgctctgcagattcaacgaagcaaaggttgtccagtgtaaatgctagcgttcctcactgtccccatcaatggtggccatgagctggccaggaggaagggctggaggagggagcttttgcaactcaccccatgggctccaggctgtctgctttttctgggcgtgatgagcaagagctctagattgaagacagcaaacaaacagccacttccttcctcacccaggtcctgcgagctgtggttgccgggaggagagctaagcctccgtagctgcttctggagccagctctcagctcccagaccctgccctggtgcctgagggtggccctggagccttgcccccagctcagtggggctctggggccacaccctgcgtccatgcactgtgcaaacaacattctcacctccaaaggctccatccctcaggggagcagggggactggactctgtttcttttcttttctctctctctctcttttttttttttagatggaatctcactctgttgcccaggctggagtgcagtggcatgatctcggctcactgcaacctccacctcctgggttcaagcgattctcctgcctcagcctcccgagtagctgggactacaggcgcccgccaccgcgcccggctaattttttttttgtatttttgtatttttattgttttgagacggagtcttgctctctcacccaggctggagtgcagtggcgccatctcggctcactgcaagctctgcctcccgagttcacgccattcttctgcctcagcctcccaagtagctgggactacaggcacccgccaccacgcctgggtaattttttgtatttttagtagagacggggtttcaccatgttagccaggatggtctcgatctcctgacctcatgatctgcccgcctcggcctcccaaagtgctgggattataggtgtaagccaccgcgcccagcccctgtatttttagagacggggtttcactgtgttagccaggatggtctcgatctcctgacttcgtgatccgcacgcctcggcctcctaaagtattgggattacaggcgtaagccaccgcgcctggcctttatacgtggggacccttgtctttctggagctgggctctttgtctcgtcgctggagattgctgacagtcggtggctaccgtctcaaacatctccacgcagaagctggagctggggaaccctggtcttgtccctcctgctttttggggaagatcctctgggatgtggtccccaacccccaagacagaaacctgcctgtctctgattcattgttacgttcactctttgcatccaatcaattatgggcatttttttttcccctctgagacagagtctcgctctgttgcccaagctggagtgtagtggtgcgatctcagctcactgcaacctctgcctctcgggttcaagcgattctgctgcctcagcctcctgagtagctgggattacaggcacatgccaccccgcttggctaatttttgtatttttagtagagatggggtttcaccatggtggccagactggtctcgaacacctgacctcaagtgatccacctgcctcggcctcctaaagtgctgggattacaggtgtgagccactgtgcccgtgcccagttagtggtcttaactgattctttctcctaaattccttttgactcccagcctttcctgtccatcctcatggccactgattctggacccagcagccacttcactggtctccctgctttgtggctgtatcttatttatttgtttagaaacagagtctgtctctgttgctcaggctggagtgcagtggggccatcacagctcactgcagcctggaactcctgggctcaagtgatcttcccacctcagcttcccaattagctggtactacaggtccatgccaccatgcctggctaacttttaaatgctttgtagagatggggtattgccatgtctcccaggctggtctcgaacatctggcctcaagtgatcctcccacctccgtcttccaaactgttgggattacaggcatgagccattgttcctggccctgtgactgtaccttagaaacaatcactattggccaggtgtggtggctcacgcctataatcccagcactttgggaggctgaggcgggcagatcacgaggtcaggagatcgagaccatccttgctaacacggtgaaaccccatctctactaaaaaaatagaaaaaaattagccaggcatggtggcgggcgcctgtagtcccagctactcgggaggctgaggcaggagaatggcatgaacctaggaggtggggcttgcagtgagccaagatcatgccactgcactccatcctgggtgacagagcgagactctgtctcaaaaaaaaaagaagagacaatcactattatcctcacatgaccaccatcaccaaccaaaggcaaccagtgaacgtcttcactctctctcctacccttctcaaagacaaacagaaactgctgataactccaataccatcatgactagccaatgtcagacaggtcccatgagcaattccagcatcagccttccttacattctcccacgatcaccaccaccaccaccaccacgctataataaccaaccaccatctagtcatcggccaggcacagtggctcacacctgtaatctcacactttgggaggccaaagcgggtggatcacttgaggttaggagttggagaccagcctggccaacatggcgaaaccccgtctccactaaaagcacaaaaattagctgggtgtggtggcaggtgcttgtaatctcagctacttgggaggctgaggcacgagaattgcttgaagccaggaggtggaggttgcagtgagccgagattgcaccactgcactccagccggggtgacagagcgagactctgtctcagaaacaaaacaaaacaaaaaaacaatactagccatcaacaaccacacataaccaactaccattagcaaccacagaaagcagcagtcaccagtcctatcctgttcaaaacccaacattgaaccagcaccaccattgctgatcatcatcttaccagaaaccaacaataaactaccagcagcaaatgaacgctactaccaacacctttcctctccaaataacagcaaccaccgatggtcatcattccactggtcaccaagcatctccagaatttccagctgaaaacaatccaccaccaacgaacaacattaaacaccaaccgccaccaccaccagcccacctgcaagagccattatcaccacgaacctgcaacaagaaacagccacaaccaccaccacaaccaatgacaccaacaacccagcaatgaccactcgcagcaactcctccccaattaccacaatcgtcacctccgtccatcctcattgctgaatccagaaatgaatggacatcccagctaatggcagctaccatggatcaagtgcatgttatgtgctctgtaaagcaatggtccccaacatttttggcaccagagaccggtttaatggaagacaatttttccatggaccatggagcggggcattagattttcttttctttcttttcctttatttcttcttttttccctttctttctttctttctttctttctttctttctttctttctttctttctctctctctctctctctctttctttctttctttctttctttctttctttctttctttctttctttcctttctttctctttcttctttctctctttctttctttcttcctttctctttctctctttctttctttttctttctctttctttctttctttttctttctttctttctctctctctttcttttttttttgagatggagcctctctctgtggcccaggctggagtgcagtggcgtgatctcgtctcattgcgacctctgcctcctgggttcaagtgattctcctatctcaggttcccgggtagctggggttacaggcgcgcaccaccacgactggctaatttttgtatttttagtagagacagggttttgccatgttggccaggctggtcttgaactcttgacctcaggtgatccgcccacctcggcctccaaaagtgttgagattacaggcatgagccactgcaccctgccaacggcattagattttctttttcttttttttttttttttgagacggagtctggctctgtcgccgaggctgtagtgcaatggtgtgatcttggctcactgcaacctccgcctcccgggttcaagcgattctcctgcctcagcctcccgagtagctaggatgacaggcatgtgccaccacacccagctcatttttgtatttttaggagagacggggtctcaccacgttggccaggatcgtttctatctcttgacttcgtgatctgcccgcctcggcctcccaaagtgctaggattacaggtgtgagccaccgcacccggccgggcattagattgtcataagcagcatgcaacctggatccctcgtgtgtgcagttcacaacagggtttgcgatcctgtgataatctaatggcgcccccgagaatctgagaggaggtggagctcgggcttgcttgcctgccactcatctcctgctctgtgacccgatagggctcatggtttctaacagacagaccatggcccgatagcagtccatgaccccgggggttggggaccctgttgtaaaggacttcagaaatactgtttcattgaatccttcagcgatcttcctggcattcaccactcctccaggaagatttcagcatccccagacagaggtgggtgtcatttttttctcttctatcatcctctgcgatacgggtggcccctcccagaccttgtctgccaagccgactgttgactaagcattttcagagggcttccttggggaggggttgcctttctttcaagtagcaaatcacttcctgtgttcttttgatcaaagccctgcccatcccaggacctgagcctccctggcttgcttctcatcttggaagaattcccaccccaacagtctcagagctccagctgatggtttgggtgtgaattccgggatgcccaatttctcatcagctttccttttttgagacggagtgtgctctgtcacccaggctggagtgcagcggcaggatctcagctcactgcaccctccgcctcctgggttcaagttattctcttgcctcagcctcatatgtagctgggattacaggcgtgtgccaccacgcccagttaattttttgtattttttagtagagacgaggtttcaccacgttggccaggctggtctcgaacacctgacctcaagtgatctacctgtctcagcctcctaaaatgctgggattacaggcatgagccactgtccctggccctcactggcttcctgaaagaaggtgttgtctctcagactaacaccacctctgcctcttgccctatgtccctgactccaccctagtaagctgtacctgccaagaatcctgcagtggccgctgtcacagccacatgctctcatcctcactgactgaatgacgagaaatgaaagctgaagtggtctacacagcagagagctgtggggtggggtcagccctggccacctcttactttgcgtcttatggtggtacgatactgctaggaatagcgccatgatcacgacagtctccccgttgctatcatcgacagacctcagacttgacaggcagcaacacctctggctgccatcctcctcttgggataagggatgcccaccaaagggtggcatggacgtattcagcctctcctgcctctgctgcagccataccgcccgtcaccggcacagggagggcgtcaatccaccccatcgcttgttagacatagcttcccatctcagccgaggactctgtggcagaacccacagaccttgagaatgttgcaactgaaagacccctgaagagcaacttccgcatctagacggatttccaaatatgacatctgtgggaaccggggccaagagaggggaagtgactagcccaaggctacacagggagacgagagactgggctggactgggaaagggctcccttaatttgcaagcaaaggaggctatgtccttgtccctgcagactctgtgattctccctgggccaccttctgtcttccaggtcctgccctatccttggatccagggataccaccctggcatccccaccacctacagatgggagcttgctccctggtaagggatgctggaggcacctgagctgcactgagagacaccccacccccacagaagtccaccatgcccctcccctcaccccaatttctgatggtcatttttaggacacctccacctggctggtgtccctcctctttcttcttccagatcccacccttgaaggacttaccatggtggggggctggtgtctgggctcctggaggctcctgaatgggtcgtgatggaggtgcaggttcagggggatcttgggggtggcttgggcatggccctgcttctgcccgttcaccggactcccggctttagttcctcttacaacagccccttctcacttcctttggcgggaggggccgaggccatgggggagggaagctgggtgtggaggggggcggggagctggctgtttggggctctgagcctgaagggaggggtcagaacttgatggcagccactactggacctcagaggcctcttccccaactccttggggacagggctgctgcaggaacatttgggtcagctggctgcaggacgaaccacctcttttcagggcgattcaggaagcatttgggcttcccgggtctctttttaaaaccaaggaaggggcccaggggaggtggctcacgcctgtaatcccaatactttggggggccaaggttggaggatcgcttgagtccaggagtttgagaccagcctgggctatatagcatgaccccatctctacaaaaaatgaaaagaaaaaaaattagctgggcatggtggcatgagcctgcagtcccagctactcagagggctgaggtgggaggattgcttgaacctgggaggtggaggcctcagtgagccctgattgcgccactgcactccagcctgggcgaaagagtgagaccctgtctctaaaaacaaaccagaaaaaacaaaaaaaccaaaaaaacaacaacaacagggaagggtgccttcttcagctgtgtctgctctgggcatccctgggcaacctccttcattattattattgttattattttgagacggagtctagctctgtcacccaggctagaatgcagtggtgcaatctcagcttactttaatctccgcctcctgggttcaagcgattctcctgcctcagcctcctgagtagctgggattacaggtgcccaccgccacacctggctaatatttgtatttttagtagagacggaatttcgccatgttggccaggccggccttgaactcctgacctcaggtgatcctcccaactcggcctcccaaagtgctgggattacaggcataagccaccacgcctggcccaacctccctctttagatgaccctcagaagtcacacgtgtttgtgtgcagaagtggagggtactgggaagcaggtgcatctgaaaggtccctgactttggatgtcacatctagatttaacagcctccagtttggctacttcctggatgacttagttactcccttttctcattgtaaaatgggaacgtgggtccccccagcagagcctggcccaggtacgtgtcagcctatgagctggtctttgggacaccagccaaccacctgaggctcctcttgacatgtgaggaaatggcagttctaataggttgttacttccccacaccacccagcaaggaggtggccgaggcaggacccgaccctgggagaccctgggggacccatgttcagatctatctttggtccagggcgataaacccgcatcccccttgaagatgttaatatgcagcgcccctagtggccacagctgggaaggagcccgtctctgctggaatctcctgagcgagtttgcagaattgacgggcttggggcatgcaattctcagcaatgtctccaggcactcaagagtgaatatgaatgggtaagaggaccccactttgttgggggccatcaggggaggcttctaggaagaggcaacgtttgtgctgacaccggcgagtaagctggagttaaaaaaggtaaaggggcaggagcgtgcacctggccatgctaagcgctcaagcaaaggcccagatatgggaaaaccatagggcaattgaggaagttcggggaggctggtgtggctggagcatgcggagtgacggagagtgtgatggccagggtggcaggtgctagaccgtgtggctttaagagcctctgtgagggccaggcatggtggctgatgcctgtaatcccagaactttgggaggctgaggtgggaggatcgcttgagcccaggagttccagaccagcttgggcaacatagcaagacctcgtctctacaaaaaattaaaaaatcagctaggtgtgctgttgcacctataatctcagttacttggcagggtaggcaggagaatcgtttaagcccaggagttcaaggctgcagtgagctgagatcgtgccactgaactccagcctgggctacagagtgagaccctgtctcaaaaaacaaaaacaaaaaagcaaaacccttccacgagaagctgttgtacttttctcctaaaatccctgggttcctgtctgcaatgttaaaagtccccttctggctgggcacggtggcccatgcctgtaatcccagcactctgggaggccgaggcgggcagatcacgaggtcaggagatcgagaccatcctggctaacacggtgaaaccccgtctctactaaaaaagtacaaaaaattagctgggcatgttggcgggcgcctgtagtgccagctactcgggaggctgaggcgagaatggcatgaacccaggaggcggagcttgcagtgagccgagatcgtgccactgcactccagcctgggcaacagtgcaagactccgtctcaaaaaaaaaaaaaaataaaaaaaaaaaataaataaatcagctgggtgtggtcgtgcacgcctgtagtcccagctattcagaaggtggaagtgggaggatcacttgagtccaggagatcaaggctgcagtgagctatgataggcatagctgggcgacagggaccgtctcaggaaaaaaaaaaaagaagtccccttttggctgttgggtagacctgggagaatgggtggtcctttccagacctgggtgggggctactggatgcactgacacacacacaccgcaattcgtagaaatctacacaagacagaactttattgatgtagggcttcctggcaggagtgtgtgggccccagggcagggtctgtagcaccatgagggggtggcctggatgtcggggtgcccctggggcgggcagggcagaggttggggtggatcctccccctagtcaggtcaggggagggtgtcagggaggtggtgctacccccccccctcccatagcagacacagattcccccccagctcggagtggaggggtagggcagtgctggggggcagggcaccggcagaccacctccccacccctactcttcacagtacatattccgatcaaaggagggggggagtgttggggactccctaagggtgggttcaaagggtgctggggtgaacagctgtcccctccccagacccaccctggagggggggtctcactatgtgaactggaaggggcggatgctgaagaggggctctggggggatagccagcccctctccatccccccagccagggccctgcaggggttcccaataaataacttccggctccgtctcacccttccctcccagttcccgcccccccggggccccctctggccggcccgctgcagggctggcggcggagaccccgccagctgtggctccgggtgccgcgcgccccctagtggccatggcaggttttgcagcacatctggcggaagtaggctcggctgcagaactgaaatttgagcaccagggggcagtaggcgaccttgttcacatccttgcactctgcggggacgggagaaggaaggaaaaatcaggtctcagctgccctccccgcagggctgcacacacgacctgcagtgcttcctggccagtgactttctgtgccttggtttctttctttttaaatttactttttttttttttttttttttttttttttacagatgttatcttgctatgttgaccaggctggtctccacctcttgagctcaagtgatcctctcacctcagcctcctaagtagttgggactacaggtgtgagcaaaccacgcctgacttctgtgccttagtttcctcaactatcaaagggggcttataatagcaccgatgtcactaggctgttttgaggatttaagagagagagtgtagggttgggggccaacacagacacattagtaatgagaaaagggccgggtacagtgtatcatgcctgtaatcccagcactttgggagaccaaggcaggaggactgcttgagcccaggagtttgagaccagcctgggcaacatagtgagagcactgcatctacaaaaactaattaaaagaaaaaaataggctgggcatggtggctcatgcctgtaatctcagcactttgggaggccgaggcaggtggatcacttcaggtcgggagtttgaaaccagcctggccaacgtgatcaaaccccatctctactaaaaatataaaaattagctgggcgtggtggcgggtgcctgtaatcccagctactcgacagcctgaggcaggagaattgcctgaacccgggaggcagaggtttcagtgagccgcgattgcaccactgtactccagcctgggagacagagcgagactctgtcacaaaacaaaacaaaaaaacaaaaaaacaaaaaaaaaaaaaaggaaaaattagccgggtgttgtggcatgtgcctgtagtcccagctactcaagaggctgaggctggaggatcgcttgagcccaggaggtggaggctgcagtgagctatgatggcaccactgcactctagcctgggcgacagagcgagaccctgtcaaacaaacaaacaaacaaacaaacaaacacgacccaataaaacaaaagaagacaaatattccctttcctttccattgttccttttcatagcacccaggaaaaaatgtccatttggggctgtaatcctcactcgttttcttttttaataaagtgaagataggccgggcatggtggctcacgcctgtaatcacagcactttgggaggctgagtcgggcggatcatgaggtcaggagatcgagaccatcctggctaacatggtgaaaccccgtctctactaaaaatacaaaaattagccgggcgtggtggcaggcgcctgtagtcccagctattcaggaggctgaggcaggagaatggcgtgaacctgggaggtggagcttgcagtgagcggagattgcatcactgcattccagcctgggcgacagtgagactccgtctcaaaacaaagcaaaacaaaaacaaacaaaacaaaacctgaagctcttgagtcccagctgagtgggtgagtcagggtatttttcagaacattgactattttgtgtgatcatgatgtctgttgatgactatggatggatatgagcttccatctagcggccagtgatttatggcaggaccaggggcgaattaaaagctacagatggattttttttttttttttggtcgcccaggctggagtgcagtggcacaatcttggctcactgcaacctccacctcctgggttcaagagacactcctgcctcagcctcccgagtagctgggattacaggcacatgccaccacccctgtctaatttttgtattcttagtagatctggggtttcgccatgctggccaggttagtctcaaactcctgacctcaggtgatctgcccaccttggcctcccattgtgttgggattacaggcgtgagccaccacgcccagcctaattttattttttgtagatacaggtgtcttactatgtctctcaggctggtctccaactcctgggctcaggcaatctttccagttcagcctcccaaagtgctgggattacaggcatgagccacctcgcccggcctgggtggatcattttattgcatctcccttctggggcacccctcaagtgaatatatcatttacatcccgtgacagataaagaaacaaaaacacagaggtggaagatgaacccaggtagtttggttgcagtgcccagactaaggaattaattgttctctatcaaaaataaatttatggacctggcgcggtggctcatgcctgtaatcccagcactttgggaggccaaggcgggcagatcacctgaggtcaggaattcgagaccagcctggccaatatggtgaaaccccatctctactaaaaatacaaaaattagctggtcatggtggcacgtgcctgtaatcccagctgctcaggaggctgaggcaggagaatcacttgtacccaggaggtggaggttgcagtgagctgagatcatgccactgcactacagcctgggtgacagagtgagactttgtctcaaaacaagaaaaaaaaaaatttacagccaggcgcagtggctcacgcctgtaatcccagcactttgggaggccgaggcgggtggattacttgaggccaggagttcaagaccagcctgggctacatagaaaaaccccgtctctatcaaagaatacaagaatacaaaaattaactgggcactgtggctcttgcctgtagtccttggggagacttggggctgagacaggaggatcgcttgagcctgggaggtggaggttgcagtgagccgagatcgctctactgcactccaacgtgggtgacaaagtgagtcccggtctcaaaaataaataagtaaataaggctgggcatggtggctcacgcctttaatcccagcactttgggaggccaaggccggcggatcacaaggtcaggagtttgagaccagcctggccaacatggtgaaaccctgtctctactaaaaatacaaaaattagctgggtgtggtggcgggcacctgtactcccagctactcagcaggctgaggcaggagaatcgattgaacccaggaggcggaggttgcagtgagccgagatcaggtcactgcactccagcctgggtgacagcgagactccatctcaaaaaaaaaaaaaaaaaaaaaaagtaaataaaaaaataaaaaaaattacctaggcagaaaaaaatgtgtatacttaaaagcagtggttctcaagggaagtgatcgattttgacccccaggggacattgggcaatgtctggagacgtttttagttgtcataacttgggagaaggctgctactggcacccagtgggtagaagccggggatgctgctgaacatcttacaggctggcacaaatcccagcactttgggaggctgaggtgggaggatcgcttgagcccaggagttggagaccagcctgagtaacacagcaagaccccatctctccaaaaaagaaaaacaaacaaacaaaaaaccctacaatgtgctggacagctccccacggcaatcatctagctcaaaatgtcactagtgcctgaggttgaaaaaccgatttaaaggaaaaatattcaggaaattgtgctacaggtggagatgaataggtacaggttatgaaagtgactggggaaatgtcacaagtttgggtgcacagaagggtcaggtgcctgaaacactcagcatacagtggcacttaataaatgcttgcagggaggggatggtgaaggatggcctggcagagacacagcaatgcatttccgaggttccagaagttctaggatgaagtcaggacccccaatgccctctgtggctgcctctggccaggaccctcctggcgcaccctggctggtcacccacataccttcagggccgtccccgggggttgggctgtcgcacttggcctcacactgctgcgtggtgggcggccgcagggcctccgtgcactcgtgcgacgcctggcccgtgtggctggtgcagcgcaccgagcgctgccgctgcccgacgccgcactgtgcagagcactgcgagggggcaccactcagttgctgccccgcagcccctgccctggcccccacccctctggggcgcgccctcctacctcaccccactcgccagccacccagcgggccggggggcagcggcgcaagttgcagcgcatggtggccggtggcttggcggcgggtgagcagtgcgccgggggcagcgtggcgcggtggtctgcgctcttgcaaaggaccacgcggtggcggaggcccggcccgcagctgggggtgcactgcagttggaaggggcgtttcgtgctcagggtgctgccccagtgcgaagtgaggaggggacagctaacctggagaccgcgcagaggcgtctccgtggacaccccacctgggcatcccagtgggcgcgaaggaagggggcggctgacctcagaccagtcgagggccgcccactccggagggcaagtggggccgtggcaggcctccagtacaggtgggcgcggctgcgggcatgcgctgtcgtccagcgccttctcctccgcggcagagacgcggcgctggcacacgaccgagcggctgcgcacgcctgcatcgcagctgcggctgcagagcgaccagttccctacaacccagctgtaagagatgaaggggtctgagcaagtaagcagggcagggggtcccaacacaacagcagggggcactatagcctacccccacccttccaatcacccagcctcatatggaaactggcaccaggcacctccacattccacacttggggcatcgttagcctgcacccagactgggggcagagaggtgcattaccctaaggagaaataaatctttggacaatgcgagtgaccaggcagcgccatcattctgactccagggccatgcagctttgaccgccaccttgggggcactattaccttggactcccccataactcctatagaaccatcactgcagcactcggcccactgtcactccgactctgcactaatctgctccccacccccctggagcactcgctcttgactccagggagtactctcctctcaccctgagcaacactgccccctggcggcactcactctggagggcaaggctccgtgttgcaggcgcgctgccttttgggcagcttgctgtgggcactgcagtagtggggggcgaccgcggagctgtccagctggttgcggcactccaccgcctgcacctggctacctggaggggagggtgagaggcctgctcagcccctcccggcccagagaacctcagcccaggtatcttgtgccttcccccacccccggcctcaccgcctgcacactgggccgagcacttggtccagggcgcatagtgccaggagtaggggggcagcgagtcacgggcgatgggggcattgaagcggtagcggagggcaggcagctcggtccgggccagcacctggagaaagggggcggcagccagtggaaggatcgcatggagtctctaattccaaaggctgcaccttgcccccagtctccctgttaccatgacgatgagagatgcattaatcggtcccagggcttcgaggctctggacctggtctggcccctgtcgcagttgaaaggtggtcccagctagaggcagacggtggggctggggggtcccaggcagcccctccagcagcagggactcctggtctcccttcagggctgggggacgatgcagggttcagaattctagtcatgctgaaaccgccctccccactgacccctaatcctcatcccctccccaccatctgctcacccaagtgactgagagagaggttcagatcctggatgaagatgtggacggagcctttgggaatccagacgacatcctcgtaccctgaacagcagagctcagatgtcacccacttggcatgtccccaacacctgcctgcctcccctgtccccggcccatgaggataacagctaactattactgcgctaaacacacatctaactgcacccctgccccacccttgtgaaccaggtgtttcattatccccattttagggctgacaaaactgaggctcagagaagctaaggaacttgaccaggttttacagctaggaaatgactgggttaggatttttctttctttctttctttcttttttttttttggagacaggatgtctctgttgcccaggctggagtgcagtgaagtgatcttggcttgctacagcctcagactcctaggcttaggtgatcctcccacctcagcctctggagtagctgggactacaggcgtgagccaccacacctggctaactaaaaaacctttttttttttttttttttttttgtagagttgggggtctccttaagttgctcaggctggtctcaaactcctgggctcaagtgatcctcttgcctcagcctcccaaagtgctgggagcaccggtatgagcctggccagctttttttttttttcagacaggatctcactctgtcacccaggttggagtgcagtggtgcgatcataggttactgcagccttgacctcctgggctcaagggatcctcctgcctctcagcctctcgagcagctggaactacaggtgtacaccaccacacccgcctaattaaaagaattttgtagccgggcacagtggtcacgcctataatcccagcacattgggaggctgaggcgggcagatcatgaggtcaggagattgagaccaacctggctaacacggtgaaaccccatctctactaaaaatacaaaaaattagccaggcgtggtggcgggctcctgtagtcccagctacttgggaggctgaggcaggagaatggcatgaacctggtaggtggagcttgcagtgagttgagatggcaccactgcactctagcctgtgtgacagagcgagaccccatctcaaaaaaaaaaaaaaaaaaaagaattttgtagagtttggccgggtgtggtggctcacacctgtaatcctagcactttgggaggcttaggtgggtggatcgcttgaggtcaggagttccaggccagcctggccaatatggtgaaaccccatctcttctaaagatacaaaaattagccgggcatgtagtgcatgtctgtagtctcagctacttgggatggtgaggcaggagaatttcttgaacctgggaggcagaggttgcagtgagccgagatcaagccactgcattctagcctgggtgacagattgagactctgtctcaaaaaaaatttttttttttgtagagttggggtctccctaggttgcccaggctggtctcaaactcctgggctcaagggatcctcccgcttcagcctcccaaagccctgggattacaggtgtgagccaccgtgcctgtctcacttttgatgccagcggccaggctgcttattataaaaccccaatgggactctacctggggactgaaactcacactctgcaacctactcctgcctcacctggacacactccctccctctgacagtgcctacggcttcctcagccttccagatatttcctgagcctcctcccctcttgcccactccctgggctctctgtcacttgcccaaagcccaagctggaaaaggtgctttctacattctctgaatatcccctcccgtagtaagcctttccctgctagcacagaacattcattctcgcagctcctctggctcacagaggatggaaagtgatgcttgcttccacccagacgtggcatgagcttctccaggaggcagaggagacagattcgggctcctgtctcctgagacactcttttttttttgagacagagcctcgctctgtcgcccagactggagtgcagtggtgtgatctcggctcactgcaacctccacctcccaggttcaagcagttctcgtgcctcagcttcctgagtagctgggattacaggtgctcgccaccacgcccagctaatttttgtatttttagtagaaacagggtttcaccatgttggccaggctggtctcaaactcctggcctcaagtgatcatcctgcctcggcctccaaaagcgatgggattataggcttgagccacttcacctggctgagcccgcaggacttttggggactcctgacactccacggggcccctggggtctgaggagttagtgatctcagctactgcactgggatcagttccacctgcagtcagctggcccatgcagggagtgtgggagggaagctggagactctcaccggccccaggtgaggctgggctgaagacgccctcgatggtctcgcaggcactgccgtcaccgccacacactcggcacttgtcctcccgcaggtcggagcccaggactcggtcgcagcccacgtgctgcgtggagaaggcgtgagtgaggcgaccccctaacccacccccgctccccatcccctctccacctccctgggagtcccctccaccttgcattcgccactgacgcaaatgtccaccgtgtctggacggcagggtgtcccgtccaccacggctgccgccctctccgtgtagaagttgaagccttccgctaggcacgtgagcgagcaggccttcacgccccctggggggcacggccccgtcacaccacgggccaggccaccccggaactctttgcttgctccctgggggagtgaggccaagagggacagaccccagacccaagaggaagggcagcttgggcagagggagtgggggctcccagcgtcacgttgaacccccatggtaccgtatcccaggtactctgtctccccgggtggggacagggctcagggcagaccccgggatgctgcattcatccacctgctgctggacactcccacggctgcccttcacggccccacagcctttggagtcccacactcacctccccggtacgttttccacttgtagaatttcccacggaaagggatgctgtcaaattcagaacactgcacttctctgaagtcctgggagccagggggacagtcctgggggcaggagaggagagatggagggaggccaggcttggggggatggagtcagaaaaggggtgctcagagaaagatgggctggaggagggaggctagaggcagggaggccagggaggaggctgtggtggtctgcgtgagactaggcctggaaggtagcctgggctgggcgtgtagacacatctgggataggactggatccctcattagaggtctgagggtgagctgggcaggacacacctgggtttctggttccaggctatggaatctttcttgcttgcttgcattttttttcttttttgagacagaatctcactctgtcgcccaggctggggtacagtgcatgatcttagctcattgcaacctccatctcctgggttcaagcaattcttctgcctcagcctcccgagtagctgggattacaggtgcatgccactatgcctggctaatttttgcattatttatttatttatttatttatttttagacagagtttcgctctcgttgccctagttggagtgcagtgacacaatctcggctcactgcaacctccgcttcctggattcaagtgattctcctgcctcagcctcccaagtagctgggactacaggcgcgtgccaccacgcctggctaattttttgtatttttagtagagacggggtttcaccatgttagccaggctggtctcgaactcctgacctcaggtgattgacccgcctcggcctcccaaagtgctgggattgcaggcatgagccacctcatccggcctaatttttgtatttttagtagagatggggttttgccatgttggccaggatggtctcgaactcctgacctcaggtgatctgcctgcctcagcctcccaaagtgctgggattataggtgtgagccactgcacctggccacatggagtctttcttgagagagaaggtctggaagggatcagggtttatagaaagtgctagcatgtggattctctgaagacctggttccccccagctgggaggctgaaaagtccaaagctctcactgccctctaaaacaccccctccccagtaaacttctcactgctcactgatggttgcaggtcagctgagggcacaagcagaggacagacacctgtcactgggtttggtgagaggaagcttcagctacaactttgggggatgacagaaggcaggggtaggactcttcaggggaagttgggctgtaaagggaggggagagactggatggtagggggttgtgagggccaagcagtgatttcaaggtgggggcttgtagtctaaatgtaggaggaaaagagagctggaaggagccaggtctttaaggaggaggggttggggacgagaaggtggtgggggtcagggagaggagggaagagaggggtggcggctgcaggttccccaggaggcagcaggtgcctggatgaagcactctgatagcgtttttgtttttttttttttttttgagatggagtttcgctctgtcacccaggctggagtgcagtggtgcgatctcggctcactgcagcctccgcctcccgggttcaagcgattctcctgcctcagcctcccgagtagctgggattacaggcgcctgccaccacgcccagctaatttttgtatttttagtagagacggggtttcactatgttagccaggatggtctcgatctcctgacctcgtgatccgcctgccttggcctcccaaagtgttgggattacaggcgtgagccacggtgcccggcctctgatagctgtttttaatgcttcctccccccacccctcaaggggtttgggggaactcacatccgtgttgcaggagcggtgccgccttctctcacccagacagtacttgcccccgatggttggcctggaaagggtggtgggataggagagggatgaggcagtgggcgatgggggcaggggtcgcgctgccctcccgggtgggggtcctgagggctgacctggggctgtcgcagtgacggctagaagaggacacgccgccgccacaggtccggctgcagtcgccccatggagtccacggcccccaggctccgtccacaccctctgggcgcgacccaaaggggacacagacccgtttgtagcaccactgggtggggggagacaggaaggagtgagtccagcccggaggacactcgtcggccccatgcaccgttccccactccaggccccagccagagatatcagcctctccgggatgggcagaggcggggtctgaacatgcgaacagagtcaggttacgtaggagagtggtctgggagacagaccaggtacaagcgagaggcgtggcctgagcacagggtgcttaacggggaggggtgtagacaggaccacgataagcgtggagacgaggtggggcgtggcttcaggctggggaggggaggtctacaggcagtaggcgtggccagagccgagggcagcacaggggatgggcgtggccaatgagggagagagcaaacagtaggcgtggccagagccgtgggaatcattacacggtgggcgtggccaacgcgggagggagttaaacagtaggcgtggccagaaccaagggacgcatagacggtgggcgtggccaacgcgggaaggagcaagcagtaggcgtggccacagccgagggagcacaaatggcgggcgtggccaatgtgggagggagcagataataggccgaaggacaggcgggtaggcgtggccaacgcgggaggtggctcagggggcgtggcccagttgggggccctggccggcgctcacccccttgtcgatggtgtgcgtctggcacagcgtgccctcggcggccgggatgctgttggtgatgcaccggttgctcttgctcagacaccacagctcgctgcagacctcctgcgggccgaggtgcccgctcaggctcgcccccctcccttcctccctggggcagcccgcccggcttgggaggacccagatgtccggctcactgccggtcccagagcagagagcccggtgctcccttcctggctcgcggtgggtcttcgtgcatccccttgcggggcatggcctgtgacttatactctcccaataagctccatttatggagcactttatacatgccatatacctctttaggcagtactaccccatcttactgggagaaaaccaagcttcagacaggtaaggtcacacagctactaagggaatagcctggagtttaacccagctctttaattcagagtctgtgctctaacgaactttgcaattcagttcctggtgccttctgagtttctggaaggaaacgtgggaactgctgaggaatgaacaggaaggatttggggttcttttatgggatgggcaaagtagccgaagagaaagtggtggttctgagaaatcggcctggatgatgactaggccaacggcctcatctctagttttttccagctgttggttctctttgttcccccatctaaactggagaagcccccaacacttttaagctatgtggaggggtgggagtttgggaggggacaatgccgagttaggtctgtgtgggacatgcctctctttctccaggtgaaaaatcagccccaccttcttcccgtctgaatcctggatgggctgaactagtcccagggactcactctgactcttaaagtccaggttaatatccctggagaagccccagtgagttcaggtgaagcaaaatctctgaccctcttggcccacatcctaagcaacctcccagcgtctttcctctaaaaagtaggtggtcctctctgaccctcttggcccacatcctaagcaacctcccagcgtctttcctctaagaagtaggtggtccttctgtaattatcaagtgtaatccccgctttgaacccaattcttgtaagctttccagatgtgggactggatcgatcaatggccacaggaaaggacccttcctaggtcagcccctgagagatacctgtacatatgtaagaagctggaagagttgttctcaaatacattctccctcaaaggtcctctagaatctctgccttctgccttatagaggacatttctcagctaaaaactcagactgtgtcctcttggccatatctaaaaatatcacatcagtcctgtcgcaatcccacttctgacacctcttcaagataatgatttcagctctgcttttgtcctcctctccacaaggaggcactgtggcatatttgagttgtgcagagacctcaattctgctaccaacttgcaatatatttcccctctctgggcctcagtttactcatctacaagatgggcagcctaatgcctgtcttgcctatataaatggctatgaggcacgtgacaggatagataagaaaggacttgcaccaatgccattatggggtaacaatgaccaccactatctctggaccaggcaccaggctgaaccctttacatatattaaccagttcacatttagtaaataaatccccctttgccaagatggcctgaaagatgttccttcaaaaactaaaaggaaggctcaattcaacatatagccagtgccagcccaagcttgatattttgacagctcctcccctcccctgcccctttgtaaaatttagagagtcatgagagacctggatttaaatcccagctctgtcatggtctcaaactgtggccttggacaagtcatcctccctatgctatggctcagtcccttcctctgtaacgtgggggctagcaggattgtcaggagtttagatggtgacacacagcacatgcttagcccatagtgagagctcagtaaatgtcagacaccatgatcattgttaggatacctgggtcacagcagatgttgaggagtagcttcagaattctttaggaattccttagagggtgctgcagttaccagctaagttaggatgttggggggtgtcaagggtggaatgtcagtgaaatagaaattgttccagggtttgtctctgtcttgcagtggaatgaagggagggcaatttggcagctgcttgccctctgctttgcattaacatggcatcacaaaaactctgatcgtttgagttgtgatagtgtgaagaactggggctgaacctgggcccctagggctgagactgtgaggagcttaggggtgcatttagggaatcgaggcaggtgggcagaggaggagcagatcctggctgaaccttggtggctgaagcaggaagccagcaggtcttcagcttcctggggggagctgggagtggaacctcctgccccccaatgcccttctctatgcacgaatggggctttgggaatctaaacctcaggaaagggtggggagaggtcaggaggctcagagctcctccagacagggagtccctggaaggttctgtctagttctttgccaagtaggaaagatggctcatccccagggaaattatttccgtcaggactggatgtttagttaaaaactgccccgtgagaggtcttgagactttgatcctgctgtagcccacagggggtgtgatgtgccagacagaagctggccccccagcccagccctcaaatcaggggtctggagaagcaggtgatcccatttttgttcccaagcactgtctgattgcttaggacattttgcacactccatgcacctctgtcctcccaggtcaccatgggggctcacctcaccccccttcccggttctcccaccccctcacttcccaggtgggtgccctggtggagttccctcccccagccccagcggccccctcccctcccaggaaggaaagcaggaagactctctctaccccgtatttacactgacgcgatttgactccatgctgaaagcggcattgctcatctgcatcgtaggcttggcccggtgccactgtcgggtacacaaagtcctgtctggggggccggttgttcaggcagagccccaggcccgagctgcctcgagagaaaagcaactgtcatgctaggtggctgcaaatcaagagctcaggagcctcagctggatgggggtcccagggagcatccctgatttctatcgtctcccgtgtaccctgccccaccatgagtgtgacccgctctgagggacacccaggtgcatcctcactctagaaagctggtgatgtagtcacggctgcaggatgaccacacgaatgggttggtcttcatggtaatgtgggcagccatgagcttggctgggtcctgaccacgggccccacagctgtttcccacgccgtcatggttcatgccgaatctggggaaaggggtgtcggctctgccgggcgctgagggacccgcccagctcctcccctcctccccctcttgtgtgccctggcctcacgtgtgcccgatctcgtgggcaatggtgaacgctgtggccaggccaatgtcctcattgacgctgcagcttctctcgcgctcacacattccgcccaccggggccaggcctgggaagacggacatgtggggatggggctgggaggctcaggacggtgctggctggccccatccacctgccaggtctcaccccagcccactgccttcataggcgcctgaaacctacggggctcgggtacctagtgtgccgcagggtttgttcttgtagatgcagatgtcatagctgtaaaaggagacagggtcagtgagggggctgggctgtctccctaagccctgctgatgccaccatgcccagctctgggggttgagtcctgccttggaggcgccatctgcctctcacctgaagctgcatacaggagtgactgaccacatgaatgaatgaatgcatgcatgcatgcatgagtgggagaataagtgaatgagggcatcggtgcccaaatggtcccaaacctcccttacccattattctcaagcagcccctccccatccctggctccctcatgggcagcccaaacttctctgctcctcctgaccctagcagaagtgatctctgtttggactctcatggttccctggaccatctgttttctcagccccagtcctagacctctcctgtcccctcaccgtgtgatgagcactgctgtgtcatggttagccacaccgttctctggaatggcattgccatggccgctgtggttcacgatggatttctgccacttacagaagctgtccagggacttcccggcatggtgggtgatctccagagtgggctggggatggacagagggaaatgcatgggcacccaccacccaggggacggcaggacatgctggtatgaaggggaaggggaaggggaggaagtcccccgcacctggtcctccgtgagcaggatgaggcgagttacgaggatgttaacggtgcttcccagactcgagtcctggaaaagtttggcaacctgacctccaagaaacaagagagaccgagtcttaagaggagcccagggtagaaaatgaaaagcaaaaacaatgataacagcttgctttcatcaggcacctactgtgtgtcgggtcttaggctaaacctgctattagggttttttgttgctgttgttgttaaagatgggggtcttggtatgttgctcaggctggtcttgaactcctgacctcaagtgatcctcctgcctggcctcccatagggctgggattacaggtgtgagccaccatgcccagccatgtatcagtcttttcatgaataggtaatatttgctgttgttactatttgttgttgttgttttttgagatggagtctcgctctgttgcccaggctgcagtgctgcggtgcaatctcagctcactgtaacctccacttcccaggttcaaatgattctactgcttcagcctcccaagtagctgagactataggcgcacatcactatgcccacttaatttttttttttttgagacagagttttgctctttttgtctagggtggagtacaatggtgtgatctcagctcactgcaacctccgcctcctgggttcaagcgattctcctgcctcagcctcccgagtagctgggattacaggcgtgagccaccgtgcccagccatgcccgcctaatttttgtatgtttagtagagactgggtttcaccatgttggccaggctggtcttgaactcctgacctcaagcgatcctcctgtcctggcctggcacagtgctgggatcacaggtgtgagccaccatgcctggccatgcatcagtcttttcatcaacaggtgctattatcatccccaatttacagatgaggagacatgcaaacagaggttaggacacagctggtaggtgtcagaagtgagactcaagtctggattgcttaccagaacatttctttcagactcctccaagctcagcttatctacttgtcccccaacccctgcttacccccctgactgcctcaagcatctttgtccagaggcgacctgagggatatacatgtctgagttcattccacagctgtctgaaggtaccaatttgcccatcaccacaggaaagtaaaactgtgagggcaggaggctctggagacagtggtcagaggaaaggaggaagcagccccagggatgagctggcacagaagacagaggccaggctgtgcagggatcttggaaccctgggtaatcatttccccgtctggaaatccccagaattttttttttttttttttttttttttttggagatggagtctcactctgttacccaggctggagtgcagtggcgcaatcttggctcactcacctccacctcccgggttcaagcgattctccagcctcagcctccggagtagctgggactacaggtgcccgccaccacgcccagctgatttttgtatttttagtagggacaggatttcaccatgttggccaggcttgtttcgaactcccgacctcaggtgatccacccgcctcggcctcccaaagtgttgggattacaggcgtgagccactgcaccgggctggaaacccccaggaaattctgaaagccctagggagagaggccaggctcaggcacaactgagggccatcagagacgacactacacaacattttggaccctctgcctgtctgctaaactttttgttttcccttttgcttcagtgaaacaagagcaccattcatcaagcccttactatgtgccaaatagcctacctggcttcccttccaccaatccttactctctagggtagctaccattatatctccatttgatacactggtacgctgaggcttagagaggtcaagaatctcgcctgagatctaggatggaaatggactatatctgaaggtgggttggggaggtcagcctgtaggaatttataagtaggtgcttgtgcaagaatgctgcgtgaatacggatgtgtgcctgtgtgtgtactgctaacctcaacgagtacctgtgagctacctatctatcatctatctatctattttgagatggaatttccctcttgttgcccaggctggagtgcaatggtgcgatcttggctcactgcaacctctgcctcccgggttcaagcgattctcctgtctcagcctcccaagtagctgggattacaggtgcccaccaccacgctcagctaatttttgtatttttagtagagacggggtttcaccatgttagccaggctggtcttgaactcctgacctcaggtgatccacccaccttggcctcccaaagtgctgggattacaggtgtgagccaccgtgcccagcctactgcgatttatttatttatttatgaatgaatgaatgacagggattataacccactgcgtctcaaactcctgggctcaagtgatcctcctgcctcagcttcctgagtagctgggactacaggcatgtgccaccatgctctgctaatttttaaatgttttgtagagacgggatttcactatgtttcccaggctgctgtgtacttatttttttatttttttttgagacagagtcttgctctgttgcccaggctggagcacagtggcgtgatctcagctcactacaacctccacctccctggttcaagcgattctcctgcctcagcctcctgagtagctgggattacaggtgcccgccaccacgcccggctaatgttttgtattttttagtagagacggggtttcaccatgctagccaggctggtcttgaattcctgacctcaagtgatctgcccaccttgggcatgagccactgtgcccagcctgtgtgtatttttacacacagcaaacacttatatgccacctactgcatgccaagaactgttctacatgctttatgaatgcactggatctaccttagctttataaagtaggtaccacaattatgcccattttacagataggtaagacaaggcagagaggtgaagtaacttgctcaaaggcagacagttaaaaagtggcagagcggaaatttaagcccaagcaggttccctctgccccagggcacctctgcatctagtcactgtgcttatgctctttctcctcctcgttcattgccatatgcaaccaacctacctacctaccttccttccttccttcctctctctttctttcttttctctttctttctgtcttttcttttctttcttttcttttttttttttttttttgacagagtcttgctctgtcgcccaggctggagtgcagtggcgtgatcttggctcactgcaagctctgcctcccaggttcacgccattctcctgcctcggcctcccgagtagctgggactacaggcgcccgccaccacactcggctaattttttgtatttttagtagagatggggtttcaccgtgttagccaggatggtctccatctcctgaccttgtgatctgcccgccttggcctcccgaagtgctgggattacaggtgtgagccaccgcgcccggcctgcaaccttcctttctacccctgtccccacgtcagggattggggtgggatggtagccacccccttgcctaacactgcaggctggctccaagtcctcagggctgcgtgcccagggaggggaaggcacttacaatgttcatgatggccaggacatactgctccacatcccggcgcccgtgataggccaccatcatcttgtcagccaccaccagggtctccacgtagcgctctcggctgaccgatcgcttcaggcctggctggccacgctctgtttcattccccaggggcctggcaggcggtggcttcaaggtccgcagccaccatggccgccctttccacggtttctcatctggggaacccagtagagcaattaagccctgccctgctggtgggacgcagagctgcctgacaactgtcttgtccaacctctgactggctacctctctacccaacagtctggacagacaatttctggtcattctgctgccttctcttgttgtccagctacctgtgtgatggtctgtctgcccaatgggctgccaaacacctcatcgtttttcttattctttttttttttttttttgagacggagtatcattctgtcacccaggctggactgcagtggtgcgatcttggctcactgaaacctctgcctcccaggttcaagcgattctcctgcctcagcctcccgagtagctgggatgacaggcatgtgccactatgcctggctaatttttgtatttttaattgagactgcatttcaccatgttggccaggctggtctcgaactcctgacctcaagtgatccacccgtctcagcctcccaaagtgctgggattacaggtttgagccactgcgcctggctgcctcattgttttgtctatagggcatcttggcggtaccatctcttttttttgtcagtgtcctactacctgagaatattgtagtctaccatgatgtcactgtccctctgccaaactgttgagttgaataacagcctgacttctcccactgttggttgtatggctgttccactgcctgtttgccaacctgttcagctaccagcctgccccgctgcccaaatgtccaactgaacacttgcatgactgtcccacagctaagctggttggttgaatcactgtcccatgatgaccagcatgattgtacaatccactgacaattccactgcccgaatggaatggtgtgaaccagcctgttttgcaatttgaactgtgtgcttggacaacgtgttgtccttctagctgagcaactttccaatcaatgcactgcccaattagatcagttagttctaactgcattgcagttagaacaatcatactgcctgatgtactacaaccagatggtctcatggaccacccaactgtgacatcgtacgtcatccaccttttttctgtctgtactgctgactgtggctgtatgtctaccacagcatcctactcatagagtatctgattatatacttaattcaatatcacactgttctgcttttccatctaacattcatctgattttcttttttgagacagagcctcactctgtcgcccaggctggagtgcaatggcgaaatctcaactcaccgcaacctctacctcccgggttcaggcgattctcctgccttagcctcccaagtagctggaattacaggtgtgtgccaccacgcctggctaacttttttgtatttttagtaaagacggggtttcgccatgttggccaggctgatctcaatctcctgacctcaagtgatctgcccatctcggcctcccaaaatgctgggattacaggcgtgagacactgtgcctgaccctgattttctatatatatattttgaaacaggaccttgctctgttgcccacgctggagtgcagtggtgtgatcaaggctcattggagcctcaatctccctggctcaagtgatcctcctgcctcagcctctcaagtagctgggactacaggagcacaccaccacacctggcttattttttctatttttggttgagatagtgtctcactatgttgcccatgctgttctcaaactcctgggctcaagtgattttcccgcctcaacttcacaaagtgctaggattacaggtgtgagccaccatgcccgaactgacctggtttcctagcagtacgattgtgttggtaagtattttgttggtgtatagctttccttctctctcatttcttaaatgcctgattgtacaaccatcctcctaccagtctgatcgtaaatctggccttttggctgtataactgctggagtatctgatacaaccaccacaccgtctaactgtctgatcagatgataatcctagagaaggaatggttttatacctgaacacctttctggctgtcttactcagtgctgggctaggtgactatagcagggataagattattccatagctccactggttcgccgtctgaggatatgtctctgctgtcccctggatagaactccctattttttctttttgagacggagtcttgctgtgtcgcccaggctggggtgcaatggcgtgatctctgctcactgcaacctctgcctcccgggttcaagtgattctcctgcctcagcctcccgagtagctgggatgacaggcatgcgccaccacgcccagctaattttgtatttttagtagagatggggtttcgccatgttggtcaggctggtcttgaactcctgacctcaggtgatccgcccacctcggcctcccaaggtgctgggattataggtgtgagccactgcacccggccggaactccataattatatcactgtgtccccttctcagcagctccattcttcccctcacataactgcctgctgactttctggataaaaagacactgctgcctcaagggaaagatactgtgtagccctctgcccatccccagaaagaccgatgtacctctcactccacaggctgtgtccaggtgggggtgacgcagagaggaacgcttgtacaccacatgtggtccactttcctccgggctccgagaacccttgggcccaccgtgcaggggctcaatcaggtactcttcctcgtctgccacgatcaggccgtgctgggttttgagaagtgggatagaaagctctcaggatcaggttctggagcttaggacccctgggaccttctctctgtctttatgatttcattcttatcaggtttattttgctatttctttttttttttttggcataggtaattagtgtccatgctatttatttatttatttatttcttcttttggagacaaggtcttactctgtcatccaggctggagtgcagtggtgcaatcgtagctcactgcatcctcaacttcctgggctcaagcgatcctcctgcctcagcctcccaaggatctgggactataggagcacaccaatatgtttggctaatttttaaaatttttaatttatttttcatagagatggggttccactatgttgcccaggctggtctcgaattcctggcctcaagtgatcctcctgcctcggcctcccaaagtgctaagattaaaagcatgagtcagcatgctcagcctctaatttctttttattttaaaattatatatgtgtgtatgtgtatagtatgtatgtatgtgtatacatacacatacacatatataattatatattatatatatttataaatataaaaaatatatatatatatttaaagagtcagggtcttgttctgtcacccatgctggagggcagtgttgtgatctcagatcactgagacctccccctcctgagttcaactgattctcccacctcagcctcctgagtagctaggattacatacacataccaccatgcctggctaatttttatatgtatttttagtagagatggggtttcaccatgttggccaggctggtctcgaactcctgacctcaagtgatctgcccgcctcaccctcccaaaatgccaggactacaggcataagtcaccatgcccagcctcgaattttttgagattgatgtttagctcattaattttcagccttacctaaggctatacattttcctttaagtactgctttagctgcatccccaaagcactgattggctcaaaacacttaaaaaacatcccactatcattccttctctgccctctatgtagaagtgtttttcttaacttccaaacttatgggcatttccccccgcgttccagaatcctcagctcaccaggcctccacaggtgctgatggccacatgggagctgctggcctggccctgcaggtgaccagcgtagaggcagtggggccgggccgccctctgccaggccaggccctcccgtgtccagtactccacggagacgtgccctgccagtagacgggagctgcgggtcaggttcagcaggaagtgggtgctgggcgaggccactttgtagaagaggcgggactcggctgtggcccccgtgccgcggcgctgcctccggggaggaggtggcgagaaggccagcagtgccccgttgtggtccacgcgggtggggaaggcgatctcatagctctccagactggacaggaactcatctgtgggtgagggtcagaggcctggggtgggccctggtcttattggacccctgtgtcctggctgttaggctgctggagcaagtgatgctggcctcactgacccccgaaatccagggagttggctgcaaggctcccgcctattgaccccagggccttcccccattgacccccatcccagccccctgatgcctctttctgttggagcccaactggtctcttacatttttcgctccctccccaccgccaccaccagacttcccctaccttgagaccggaaggcgtgcgtgacctcgaacatgaggcccagccccagggcgagggcccagcggaggatctggcaggcgggagccatagaggccacgtgtccacatgtctctccccagccccggctgccggcagcccccacagtgccgcctcccctgttcacagccttcgcagcatcaccgggctcctgggaggggggagccaggtaagggggcgcctggtcccgctgtccagcacaaccaatgccaaggccaatcatggccaaagcttttcacctgactctgaagattctgaatgcattttctcactcagtcactcccctctccccacctccccttccaatccttcctacactcctacaagaggacagacagggactgggacgctgggagtatctcctatgtgccagctactggccctagttttcacaccactgcatttctgttcttttgttaagagacagggcgttgctctgtcacctaggatggagtgcagtgttgtgatcatagctcactgcagcctccactgcctgggctcaaataatcctcctgcttcagcctcccaagtagctgagattgcaggtgcaagccaccacacctggctaatgtttttgtttttttggagagacgggggtctcactttgttgcccaggctgatcttgaactcctggcctcaagggatcctttcacctcagcctcccaaagcactgggattacaagcatgagccactgcacccagcccaccgtatttcatttccaaaataactgagaagtcatggtcatcacgctcttttttttgagatggagtctcactatgtgacccaggctggagtgcaatggcgcaatcgcggctcactgcaacccccgcctcccgggttcatttgattctcccgcctcagcctcctgagtagctgggattacaggcacgcatcaacacgcccagctacatttttgtatttttagtagagatggggtttcaccatgttggccaggctggtcttgaactcctgacctcgcatcacactcgtatccctcatctttttatagatgaggaaatagactcaggagtgatagagtttgccgtgggtcacattgctagaaagtggtagaacctgggttcattcattgggttatagcctccggtggagggtggacgggggcatgacagccaggcatgctaaggatagcaacccctacttgccctagccctgtggggttccatctcttaggagtgacagatgacagtcaagtgaatggagaatagttcagattgtgacatgttctctagaaggtatcaatggggagactgggaagcagaggttcaaagcataagaaatcaatggtgtgaagagacaggcgaaggtgcaccaggaggggaaacagcaaggtcaaaggcctggaggttgggtagagcctggcatgagcccagacagggtgggtgcaggagagcaaggggaggctggcatcagaggcacttgaagggggggctggtcggtgtgaattttcaagccagattagagctaaggctcccacccatgcatctactgtcctgggccctgtctttggattatctgaaatgggtagcaccattcaagccagatttttaaagctaaggctagtattccagtcctgcagactttcatatgcccacccacgcacccactgtcttgggccatctttggattctctgcactgggtagcactattcactcccacctcccaggcctctcctccaccctgtgtttctgaccccgtcctccattcagattctttcaaggctccaagccagcccgccccgcaggtctcagtctctccagcatctgccccaggccagcctgccgcagacaccactttgggccaccaccctgtgccaaaccctcttcccccaccctgctgtctccaccctcctcctcctctgtgcaaaatcccttaatcacagagtcttgttttctttgcagcccagccaagtctgagagtccaagtctgagagtcaatccccaaacagggcagttcagccccaagggagggagccaggtttttgccaagttgctgatggaccaagaagcccacattccccacttctgcttggatccctctagtgacggggagctcactcacagatattctgtgacccctgttgcactctttagctgggctaatgtccattccttctgttgttgttctctctctctctctctctttttttttgagacggagtctcactctgtcgccagggtggagtgcagtggtgtgatctctgctcactgcaacctctgtctctcgggttcaagcgattctcctgcttcagcctcccgagtagctgggactacaggtgtgcgccaccatgcccagctaatttttgtatttttaggagagacggggtttcactatgttggccaggatggtctcgatctcttgacctcatgatcagcccgccttggcctcccaaagtgctgggattacagccgtgagccacagcacctggcctctctctcctttttattttttttaccttttgggggcttcggttggtggagtagtgttgggcccctgtacggatccttccctcgcctgctccctgcacctgggcctccctctctgggccttggtttcttcttctttggagcctgggcagggaggggtcaaagaggaggagccgggctggtcttcagcactgagctgggtctgtagttgagggatcactgaggaaattctgaccctctctctgcccctggagaacttcctcttagacttcttctttcttctgttcctaatgaaccccctccaacaaaaacccacctcctctccctctccctctcttcttgcttcttcttccctattccttctttggaagtgtcagccaactcccagatcaaggcccttcctggttgggcacctctgacccccgctcctgccctgagccacccctgaaaggtaggaacattctcattgcaagtgaagcagggacctcacccctttctcccactggctccctccctcctctcctgttcttgcattgccaggcctggtgccccatcctcctccttcaggggctctctctggtcttgtctagagtgtctttgggtctgtcctggtccccctaagaccctcagtcctcatcactgtcctctgaagtgaggcgctcctcccaaaaccctcacacccccttctgtgctttgggctcaggtggggtgtgagggacaaggtttgggacattgtggaaggacccagcacagggggtgaggacaggggaaggggactcacctgtgcacagtgtatggggtagggggaggaggggggtctgcagaaggctcacaggcgtctgagctgggggtccagcccacagggtggtgtcgaggtgtgacacagcccagggcaccaggtggtggggggacatgaacaaggcagtgggtctggggccaaagatgaagcttgagagaggctcagggacagagacggtggtggccaacaggatgtcagtgagggatctgcactgtggcgtgtgtgtgtgactgcatgtacattacagcatgtatgtgagtgtgtgtgaccctgtgtgtgattgtgagcgtgtgactgcatgtgcattatggcttgtgagtgtgtgtgaccctgtgtgtgtgtgtgtgtgtgtgtgtacccaggcctggccattcctccagcccctcctccccgaaggcaggagggaggtggccagcgtgggggagggtgccaggcctggaggaggaaatgcctccgggaaatggaaatggcttagaaacagaggctctgtcccatcccatcccatcccggggatcctgaagggaccctaagctccacacccaaacctctccggccaggctgcggggacagggccgacggaaggtcccccgtggaggccaaggccgcgtctccccaggcagaggccccagcctgccggcctcctcccggctgcacatctggccgggccggcaggaggcagtccctgccggagagcagacaaaggcccagccggggcctgcgggaggagggggccggcgcccgggctggtcccccacaaccggccgctaattaaaggccctgagcccgaccgctggagacaccctgagacagacggctgtggcctcactgaccaactcaggggaagtgggcggcgccactcccacacccagacacacaaacacacactggcagcgacacacaccccgcgcaaccagagaccggcgctcgggcactgtagacccacaaaagacgcaggacgcctccaccgcagacacacacgccgacaggctcagtgcacactcacacacccggagacaaacacatggagacacacaaccacacactcccagacatgtgtaaacacacactcatttacacgcgcacacacgggacaagacagagaaacacgcggacacacaaatacacgcacccggggcctacacaaacagaaacacacacatacatacacagacaacccaaggagacagacacacaggcctacacgctgacacatacacactcatttgcatgctcacaccaaaccagagacaaactcacaagtcccacagacctagacacccccccacaccagacacacacacacaggtatttacacactcatcacggtcagagacaaacgcacacatgcttggggacacacacacaaacccagacacacacacactcgcctccagatctgcgcgcacatagcaaacccctatgcgcacacactgtccaaacacacagacacacaagagactcatccccaggcactgacacacacatgtaatgcacaaccactctgcccctacgtggacggacacacacacacacacacacacacagcgcaaacaaacccacggcaaccccgggcgtgatcagtggcgcgcgcacttgcggacctcaggcaccgaccggagtcgcacagcgggatgccctcccccatccagggcaccacagccccacgccctcacagcccgatgcggacacacaaagtcccactgaatcacgcacccccgggccccccgcccgcgccgctacctgcgccgcgcccggggcctccgcgccgtcgccgccgctgtctcgccgccccgcgcgcgcaggaagggagggagcgagcgagcgcggcggcgtggccaggggagggggcgcggggaaggcacttcctgagccgcctgccagggttataaaaaaacccccaaactgcgcgcggccagaaaccccgcccgcctgccgccgcccggcctgggccgcgggctggaccccagccagggacccgggaactcgggccgccccgcccgggaccagcgcccccgccgcgtgggagggggctggggaaccgcggggggcggggaggggacgaagcgggagaaatcgagtggcggcggggagaatgggtgggggaggggagaaagaatcaggtgggggatggggatggaggcagaattgggtgggtgggggttcggggaaagggaggaagagaagggagaggttgggggagggggaagtttgaatgggaaggggtagggggagatggaggcctggaggaaggggctgagtgaggtggggggaggtgggggcctggaggaagggctgagtggggtggggggaagtgggggcctggaggaggggctgagtggggtggggggaggtgggggcctggaggaaggggctgagtggggtggggggaggtggggcccttgaggaggggctgagtggggttgggggaggtggggccctggaggaggggctgagtgggttggggggaggtgggggcctggaggaaggggctgagttgggttgggggccacgggaaggaatggaggggggtaaggaatggggctggaggggggatgggagcatgagatgctggggttggggaggggagagcccacttcctcgccagcctctgcggcatcaacaacagctgttatttattgagggctgggcctggctcaaacaagcatttattgggcgcctcccgtgtgccaggcacggtgcccggggcgggaaataagtcccagctcggccccgccctctccgagctctcaggggggtttgatcggtcctgggcctggccttggtctctgtgccttaactcctttgcggtgacgtaggctcagctggtcccatttcacagatgaggaaactgaggccacagagatggggagagtgaaaattctgttggaaccggagccctcttggtcttggtcactctgggtctcgctccataaaatgaacgaatgcgtgaatgaggaggacctggatggttggggcagggctgggatttgaatcccaggcgcctggtacagtgcctggttccagggaagggcggtgacccccaggcctcacaattgcaggcatttcccaggaacgcccccccccagggagctggccagagccttggccttggctttgtctgagtctgggtttactcatccacacagtgggggtaataacagccttcccagggctggagtagggggtggaggaggggtttcattctgcagcaaagatttgttgttatgtgctgggttccagggacacagctgagaccaggagggcagcttcccaactcggaatttttccttttgaacttggaatgacctgtcattactcacgcatacagcaggtgctgcataaataccagactcctggagttcccaccacactaccttaccccaacctcctgggactccaggctagaccagaggtgcagcccccaccctcctgtttgctccccacactccctccttcccaccagggcctctcgggcccccatttgaggaacgagtctaagtcagccatttctggcctctgttagctgttcttctactacctatggggccctctttctccatcaaagaggtggtggcttcctttctttgctgtagatactaaaggctcccactgttagcctagtgactggtccagccacctgtccctactttttttttttttttttttttgagatggagtcttgctgtgttgcccaggctggagtgtggtggtgtgatcctggctcactgcaacctccgcctcccgggttcaagcaattctccagccccagcctcccgagtagctgggtttacaggcacctgccaccatgctcggctaattgtatttttagtagagatggggttttaccatgttggccaggccagtcttgaactcctgacctcaagtgatccgaccaccttgacctcccaaagtgcttggattacaggcgtgagccactgcacccagcccacctgtccctcctcttaaggatgggtggtttccagaccgcactgggaatttcagggttgctttgagccaggcgctcctaggttctggcactcctaggttctggcactcctagctgtgaaacctctcattataattactctgtgaaactttgacagttctacacccactacttcccaccacagccccagacttcactggggtgggggggtctctttatttcctcaagggcgtgtggccctctagggcctggccgattgtttaggggatgcaccttccccacctgaagcctccagtgagctgtgttgaggcatttgtgatgagtcttgggaaacaaacttttgtgtctttttctttttcctttttttttttttttttttttgagatgcagtctcgctctgttgctcaggctggagtgcaatggcgcgatctcggctgaccacaacctctgcctcctgggttcaagcaattctcctgcctccgcctcccgagtagctgggactacaggcacgtgccaccacgcctggctaatttttgtatttttaggagagatggggtttcactatccttggccaggctggtctcaaactcctgacctcgtgatctgcctgcctcggcctcccaaagtgctgggattacaggtgtgagccaccacacccggcccttttctgtctttttcttttgagacaagatcttgctctgttgcccaggctagagtgaggtggtatgatgatagcacactgcagcctcgaactcctgagctcagatgatccttctgcctcagcttcctgagtatctgggaccacacatgtgagccaccatgcccgattaagttctttttttttttttttttttgagacagagtcttgctctgtcgcccaggctggagtgcagtggcgcgatctcggctcactgcaacttccacctcccggattcaagcgattctcctgcctcagcctcccaagtagctgggattacaggcatgagccacccacgcccggctaatttttgtatttttagtagagatggggctttgccatgttggccaggctggtcttgaactcctggccttaagtgatccgcccacctcagccttctaaagtgttgggattacaggtgtgagccactgtgcctggcctcaaattgtagagacagggtctctctctgttgtccaggttggtcttgaactcctggcctcaagcaatctccctgccccggcttcccaaactgctgggatttacagctgtgagccaacaagtctggcctgacttctgtgtcttgagtgggatggatttgaagctgagtccctatcttagacaacagagggaggcctcttataagaatgaagccagctgggaatgtgggttcactcctgtaatcccagcactttgggaggccaaggcaggtggatcgcttgagctcaggagttcgagaccagcctggacaacatggcaagagcccatctctattaaaaaatacagagaaatagccagggcgtagtggtgcatgcctgtggtcccagctactcgggaggctgaggtgggaggcttgagtccaggaggtggaggttgcagtgagctgagattgggccactgcacttctgcctgggtgatggagtgagactctttctaaaaaaaaagagaaaaaaaaagttaagtaaataaataaaataaaaataaaaaatgaacgaagtcaccagatggagcagatggaggagagtaatggccttggggccatcatcatttgagccctgagcaagctgttcctgaagcccatagatgggctttaatccagtcacactctttattgagcactatattgtatcaggtgctgatccaggtactggggacatggcaggaacaacaatctccatcccacaaaggtcaccgtcctgcctcaaggcctttgcacttgctgttccctgtgcctggaacaccctccctccccaacccccttattccatggccagctctgttttgtctttgcaaatttttttttgtttttgaaacagagtcttgatctgtcacccaggctggagtgcagtggcgtgatctgtggagtgcagtggcacgatctcagctcactgcaacctctgccttctgggttcaagcgattctcctgcctcagcctcttgagtagctgggattacaggcgcatgccaccacgcctggctaatttttgtatttttagtagagatgggattttgccatgttggccaggctggtctcaaactcctgacctcaagtgatctgcctgcctcagcctcccaatgtgctgggattgtaagcgtgagccactgcacctggccatctttcaagttttgactcaaacatcgtttccttagggaggcctgcactgatcccctcacttcaacatgacaccccaacgggcttcctttcccactccctgatttattttactcttagtgtgagtcactactggacctactctatggaatacttatatctgctggcttcctgtgtctcccaccggaatgccggctccgtgagggaaggggtttttgtctgtgtggtccacagcagtatccttggtgcctagcagggtctcacccacagttagtgcccaccgttgaataaataggctcactagtaaataaaagggctctcagaagaggtgacaatgatgttgtggtttgaatgttaagaaagagagcctgttactggaaaaaaaaaaattagctgggcatggtgatgcgtacctgtagtcccagctacttgggaggctgaggcgggaggatcacttgagccagggaattcgaggttgcagtgagctgtgaacatgccgctgtactccagcctgggagacagagtgagaccctgtctcaaaaaaaaaaaaaaaaaaaaaaaaaaaagaggcagtgtgagggtgaaggcgttctaggaggagtgcacagtaactgcaaggttcctgtgcccattctctttttatttaaaccagtctggactgacttaaaagaaaaaattgtttttcagattctttgcaacctttagaacccggagtggttgtgcctagggatgcagtactgcagctctgccacaggagggcgcaatggaactccattgttgcccttggaaagtaggaactaggaaaatagaagtaatgataatcggcagggcgcggtggctcacgcctgtaatctgtaatcccaacattttggaagtccgaggcgagcgaatcacgaggtcgggagtttgagaccagcctgcctaacatggtgaaaccccgtgtctactaaaaatacaaaagttagacgggcgtggtggtgtgcacctgtaatcccagctattcagtaatcccagctactcaggaggctgaagcgagagaatcgattgaacccgggaggcggaggttgcaatgagccaaggtcgtgccactgcactccagcctgggtgacagattgagattccgtctcaaaaaaaaaaaaaaaaaaaaaaaagaagaagcaatgataatggtgataatgatggtgatggcgatggagcaggggctgtgaggtctgtcttaacttcacgacagccttacaaggtaggtgcccattttgcaactgaggaaactaagcccagagaggttgagtaacttgttcaaggtctctcagctaggattggtagaaccagaatagagcaaccaaggtaaaagtcacccataatttgaccatttagggggaaggcaggtgaactttgaggctgaagaccttcccctaggatcgggggaggagggagtcctgggggggccctgggatcattgtgctgagggctgactcttttcccagtgggtagagctcccatctctctctttctctttttttttttttttttttttttttttgagacaaggtgttgtcctgttgcccaggttggagacgagtggcacactcatgactcactgcagcctcaatttcccgggctcaggcaattctcctacctcagcctcccaggaaactgggactacaggcatgctctattttgtctggctatttaaaatttttttttcttgtagagatggggacttgctatgttcaccaggcggtctcaaactcctgggctcatgagatcaccccacctcagtctcccaagtagccgggactacagcatgcgtcaccatgctcgcttaatttaaaaatttttttttgtggagatggggtcttgctgtgttgcccaggctggtcttgaactcctaggctcaagtgatcctcctgccttggtctcccaaagtcctgggatcacaggcataagtcactacacctgacaatggagctcctaacccttagcccatctgctgggcgttttcccccagctctgtggcttggtatcttcttaaatgtggagataaatcacgccttctcaaggtcatttgaaatcaaaattcatctccaagtttcaggggcagggaagacttaggcagttaaagacggggaggaagggagtttcaagctgggggcatggcctgcccaaaatcctggacgtgggagagagggaagggcaggtctcagtttcctatgagattctcttggagtgaatatttatttactcaaacccctcctggcagaggcaacgcaactctcccacccccaccccccttcctcttgaaattcaaaacacacatttggccaggcgcagtggctcacgccggtaattccagcactttgggaggcccaggcaggcggatcacctgaggtcaggagttctagaccagcctggccaacatggtgaaacccctgtctctactaaaaatacacaaattagccgggtgtggtggtgcgcgcctgtaatcccagctaatcgagaggctgtggcaggagaatcgcttgaatccgggaggcagaggttgcagcaagccgagatcgccccgttgcactctagcctgggggacaaggcgagacttcatctcaaaaaaacaaaacaaaaaacacattaatcggccttcatttggatatcacagataatcttatcttgcaagctgagcccagaatgatctgagggctgggtccacccccttcacccctgccccatgcagttttggggcccaaaaggattcggtggctgccaggtcagtgtcctacaacagttgaaagtccccatggccggaagcccccagctatctggaggtttctcaacccacatagtgcctaaatgttccacgtgcaacatacttgcctcaagcccctctagacctaaacctttacacctctgtaaggctggtccctctgtagcgtgatatttcacaactaacgtttcaccctccttcatcttttaatactgaggactgggggttcaaatcccaccttgccgatctttgtccattatttaaacttctccacacctcagttttctcatctggaaaatgggcttaatcaggtggctgtgaggattcaacactattaatggtaaagtgcttattaccatagtgccaggcacaaagtaagtggtagctattatgattagttctggttttgttgttactatttcttattttgttttgatttttaattttttaaagttaaacaattttttctttatctttttttttttcctgagacagagttttgctctgtcacccaggctggagtgcagtggtgcgatctcggctcactgcaacctctgcctcccgggttcaagtgattctcctgcctcagcctcccaggtagctgggattataggcacccgccaccacgtcagactaatttttgtatttttagtagagaagaggtttcaccatattggccaggctggtcttgaactcctgacctcaggtgatccaccagcctcggcctcccaaagtgttaggattacaggcttttttttttttttgagacagagtctcactctgtcgcccaggctggagtccagtggcgccttcgtggctcgctgaaacctccgcttcccaggttcacgccattctcctgcttcagcctcctgagtagctggggctacgggcacctgccaccacgcctggctaattttttttttttgtatttttggtagagacagggtttcactgtgttagccaggctggtcttgatctcctgaactcatgctctgcgcgtctcagcctcccaaagtgctaggattacaggcatgagtcactgcgcacggactgttttttttttttttttttttaaagagacaaggtctttcgctgtcacccaagctgaggtgcagtggcaccatcacagttcactgcagactccaactcctgggtacaattaatcctcctgcctcagcctcttgggtagctgggattacagacattcaccaccacaactggctaatttttaaaaattttttgtagtgacaaggtctcacctacccaggctggtctcaaactcctggcctcaagtgatcctcccacctcagcctcccaaagtgttgggattacaggcaggagccaccgcgcccaatctgtttttggtttgattttttttgtttattaatcttacttgctttttgttttgatttttaaaatgctttgtttattaacatttgtttgtttttgttttgatttttagaaatgtttctgtttattaatctttatttttctttatttggttttaatctttgtttaaatttttttgtttgtttttaaatatttgtggttattattattctactctgttctttccctgagcaagggcactggtctcatatccccaagaagggggtgtccaccttggaaaaagagaggcattttctggacccgaagttccacagtgcctacggggatagggaaggcttccagcaaaaacagctttgagagaatgtttttatttttattttttttgggatggagtctcgttctgtcgcccaggctggagtgcagtcctggtgcaatctcagctttctgcaacctccaccacccaggttcaaacaattctcatgcctcagccttccgagtagctgagattacaggcatgcaccaccatgcctagctaatttttgtatttttagtagagacggtgtttcaccatcttggctgggctggtctcaaactcctgacctcaggtgatctgcccgccttggcctcccaaaatgctggattataggtgtgagccagagagaatcttgtataggaaacaagtaggccgggtgtgctggctcacgcctgtaatcccagcacgttgggagactgaggcgggcggatcactaggtcaggagttcgagaccagcctggccaacgcggtgaaatcccatctctactaaaaatacaaaaattagccgggcatggtggcgtgcctgtagtcccagctacttaggaggctgaggcaggagaatcacttgaacttgggaggtggaggttgtggcaaggcaagatcgtgacactgcactccagcctgggcaacagagccaggctccgtctcaaaaaaaaaaaaaaaaaaaaaaaagaaagaaagaagtatcccagcccagagtctaggaaagagattttctgcgtggggagaggaagaatagagacttagggaggaagtctctggatgggaggctggagtgtgggcatggagaaaacctcaggcaggctggggaccaggtcacaacaggtgggctggacagctctgtgcaggtccctgaggccacatggagggagcagtgctggtgaagtggatagaaagggcggaaacagatcgtggagcgggcggtccctacaggtccctggtcccagggagcagacgtgaggtttgtgtgcctggcccaagtgtgaggtggatgctgtcacagttcgggggtggggggtgccccaaaccgcccaggtgtccaggctgcatgggacaggaggaagatgaggatgaggcaggaggggatgtttgattgggtgcagctgtgttgaggaggtctacgtgctgggtactggggagatgccctgtctctgcgacttcatgcaatgttaatttcttctgatccttctttgatatcctcctgactgcatccggtctcttctgggcatccctggcttcccggtctcagcccgtcccaggagatgctctgatcctgcttcacgtgtttcccgccctggctggctcccatcttggctcctggtgtgattatcccacagacctggcctggggttggcttcagtttcccctctgcagctggggcagatgcggtgcagctcccggcatcccccatgattttcctcgatttccccgcgctttgtgatttcgatgtaaacttcaaacactgctccctttcttgtcctgttctgggtgggcctctgtgccgcccctggtgcacctgctggggtggctgtctttgcaccttctggtcctgttctgccaccttgaccaccccagaggtttcaggggacacttggcagaaggtgactaaaatttcccatccccagctgggtgtggtggctcatgcttgtaatcccagtactttgggaggaggaggcgagaggattgcttgggcccaggagttggaggctgcagtgagctgtgattgcaccattgcattccagactggacaacaagcaagaccctgcctcaaaaaaaaaaaaaaaaaaatcccccacccctgagtgagagaccctggggtgtgacctccttaccccttgcttggggtggaggggtggtgagtgagcggggaggaaggtatcggactgcgggtccaacttcagaaaaacccgagttggcttctggggctccagttcttcatctagaaccagctgtctttggtgctgaggaccagagatgcccaagtggtttgcttgcccgggcatccatctcccagtcctccaaggaagtcatgcctggatggagtagcccttggccaccttttctggggtggcctgggtctggtagaaggggccaagtatttttttttttttgagatggagtctcgctctgtcgcccaggctggtctcaaggtcctgacctcaagcaatcatcttgcctcagcctcccaaaagtgctaggattacagtgagccacaaagtctggcctttgtgagcatttaaaaccctgccccaccagccctccaacaacgaccaggtgaagacgcagagagaaggtggccatctacaagtcaaggagagaggcctcagaggaaaccaaccctactgacaccttgaacttggacctccagcctccagaactgtgagaaaatgaatttctgttgttttagccaggtctgtggtgcattttcttggcagccctagcaagctcatatgcttttttttttttttttttggaaacagagtttcgctcttattgctcaggctggagagcatggtgtgatctcagctcactgcaacctccacctcccgggttcaagcaattctcctgcctcagcctcccaagcagctgagattacaggcacctgccatcacgcctggctaatttttgtattttagtagagatagggtttcaccatattggtcaggctggtcttgaactcctgacctcaggcgatccacccgcctcggcctcccaaaatgctggggattacagacgtgagccaccatgcctggctgctcatacatgttttaagtttgaatgatattccattgtacatgtagaccatgatttgccccctcttgcttccatgccagtgtcccctggagccgtctccctgctgtctcctgctgtatctgggctgggctgggacctagtctcagctgcaactgtctcccctgaacccccccgtctccaacaggctctgacctccagacccacccccccttccacagtccctaagccttttcctatctccacttttcagccacagaatctgagacccagattggaagctccttgtggtgagggttagattaaatatgtaattcttataagagacttagaatggtgcctggcacagaagctattattactattattattattttgtgtgtgtgtgtgtgtgtgtgtgtgtgtgtgtgtgtgtgtgacagagtctctctctgtctcccaggctggagtgcaattatatgatcttggctcactgcaacctctgtctcccgggttcaagcaattctcccgcctcagcctctcatgtaactgggatcacaggtgcccgccaccgtgcccagctaatttttgttatttttagtagagactgggtttcaccattttggccaggctggttttgaactgcagacctgtggtgatccacccgcctcagcctctcaaagtgctgagattacaggcaggagccaccgtgcctggccttttatttactatttttttttgagacagggtcccactctgccacccagaggctggagtgcagaggtgccatcataactcactgcaacctcagactcctgggctcaagtggtcctccaacctcagcctcctgagtagctgagattacaggtgcccaccaccatgcccagctaatttttgcatttttattagagatagggtttcaccttttggccaggctggtctcgagctcctgacctcaggtgatccacctgcctccgcctcccaaagtgttgggattacaggtgtgagccaccatgcccggccactctgatattattaattagctgattgattcaacaaacatttattgggcccctactctgtgccttgttcaggcagaagaagagaacaacatctccactctcatagcactagaaaaagacaaaagaaccaataaacgaatacacacagagtagattctctttacttgtggtagttctgttctttaatgtcgccatggacactgaattagggaacactaaactgttgttcctggggaaataaaaggttaggttcctatgactctctggtcacagcattttaatcaactgatcaatacataaccttggtttatatgtgttatttaatttaatttaattttattgagacagagtctcgctctgttgcccaggctagagtgcagtggcaggatcttggctcactgcaacctctgcctcccaggctcaagtgattctcatgcctcagccaccagaatagctgggaccacaggtgcgcaccaccatgtctggctaatttttgtatttttagtagacatggcatttcgccatgttggccaggctggtcttgaactcctggcctcaagtgatctgcccaccttggcctcccaaagtgctgggattacaggcgtgtgagccattgcacccggccctatatgtgtttatttattttttattttttgagatggagtttcgctcttgttacccaggctggagtgcaatggtgcaatctcggctcactgcaacctctgcctcccgggttcaagtgattcttctgcctcagcctcccgagtagctgggattacaggcacccgccatcatgcccgactaattttgtatttttagtagagacagggtttctccgtgttggtcaggctggtctcaaactcccgacctcgggtgatctgcctgcctcggcctcccaaagtgctgggattacaggcatgagccactgcacccggcctatatgtgtttatttttaaagacaccttgttaaatatatatagttgcttcattcacattgaactcatggctaacagcaagaccactcgcgcctgaatgaagcttctctaacacatggattttctctgtgagattcatcacagtcttctgtatactgtggtttgaatgtgtccccacaaaagacatgtgttggaaactcagtccccagtgcaacagtgttgggaagtggggcctaaggggaggtgtttaggtgatgaaggttccaccctcatgaatagattaggaacaatttgaaaaggggttgagtgctgggtacagtggttaatgcctgtaactccagcactttgggaggctgaggcaggaggatcctttgaggccagaggtttgagaccggcctgggcaacatagcaagaccctgtctctacaaaaaaaaaaaaattagctgggtgtggtggcatgagtctgtagtcccagctacttgggaggctgaggcaggaggatcacctgagcccagggaggttgaggctgcagggagctgttattataccactgcattccagcctgggcaatagaggaaaactctatctcaaaaaaaggggaggattaggctgggtgcggtggctcatgcctgtaatcccagcactttgggaggccgaggtgagtggatcacctgaggttgggagttcgagaccagcctgaccaacatggaggaaactcgtctctaccaaaaaaatacaaaattagctgagtgtggtcacgcaggcctgtaatcccagctacttgggaggctgaggcaagagaatcgcttgaacccgggaggtgggggttgcagtgagttgacatcgcgccattgcactccagcctgggcaacaagagtgaaactctgcctcaaaaaaaaaaaaaaaaaaaaaaaaaaaaagaggaggattgaggctatgagcctgatttttcttgttctctcacactctctctttgcccttccaacacatgaattttggggcacacgttcacaccatagcaccatctaatggagctgtggtaaggattagattaaatacatgattctggccaggcgaggtggctcatgcttgtcatcccagtgctttgggaggctgaggcaggagggttgcttggggccaggagtttgagatcagcctgggcaacatagcgaggccccgtctctacaaaaaacagaaaaagtagccaggcagggtggcacatgcctgtagtcccagctacttgggaggctgagatgggaggatcactggagccagggaggtcaaggctgcagtgagccaagattttgccactgcactccagcctggaggacacagtgagaccctgtctctgaaacaaaacaaaacaaaacaaaaccaaatggaaaagtgtgatttttctttttatttcttttattttttaatttttgagacagagtttttgttctgttgccccagctggggtgcaatggagtgatctcggctcactgcaccctctgcctcctgggttcaagagattctcctgcctcagcctctcgagtagctgggattacaagcatccaccatcatgcctggctaatatttgtatttttagtagagacgaggttttaccatgttggccaggctggtctcgaactcttttttttttttttttttttttttttttttttgagacggggtcttgctctgtcgcccaggctggagtgcagcggcgcgatctcggctcactgcaagctccgcctcccgggttcacgccattctcctgcctcagctcccgagtagctgggactacaggtgcccgccaccacgccggctaattttttttatttttagtagagacgggatttcactgtgttaaccaggatggtctcgatctcctgaccttgtgatctgcccgcctcggcctcccaaagtgctgggattgcaggcatgagccacccgactggtctggaaaagtgtaatttttctaagaaacttagccatgggatgatgggacaagaaggcccttgccaggtgcaggccccttgaccttggacatcccagcctccaactgtaagaaataaatctctgttcttcataaactacccagtctatggaattctgtgatggcagcacaaagtgaaataagacattgtgcgcagggacacaggactccacaccagcattgtgcttggagccaatgtgaacagcaacatcaccaaaaaaaaaaaaaaaaagcacaaaaatgaaaaaaaaaaacaaccccaaaaacccaaaaaaacccagcaccactcgatagactccaaaagggcacttgtttgtatgatgagagctgagacaggaaggcagagtgtcgccttgtgtgacctcagctggggacaggtgtgtagcgccactcaaagtttttgctgctccatctgcacatgactgagaatggctttgagaaccccaccagtaatgatttgggggttaaatacattttagcaagcaggccaatttgttttgttttgtttttgtttttttgatgctttgtcacccagggttggagtgcagtggtgtgatctcggctcactgcaatctccgcctcccgggttcaagcgattctcttgtctcagcctcccaagcagctaggattacaggcacctgccaccacgcccagctaatttttgcatttttagtagagacggggtttcaccatgttggctaggctggtcttcgactcctgacctcgggtgatccgcctgccttggccttccaaattgctggcattacaagcatgagccaccacacccggccaagcaggccaatttgtgatgccagaatccatgaataatgagtatcaactgtatcatattacaggtggaagtgaatgctgtgcgggaaataaaaggctgggttgaaaacagactcacgcctttaatcccattgctttgggaggctgaagtgggaggatcatttgaggctaggggtttgagaccagcccaggcaacatagcaagaccatgtttctgccaaaagaatgttttttagaagaatagctgggtgtggtggcatgtgtctgtagtcccatctacttgggaggctgaggcaggagaatcgcttgagtccaggagtttgaggctgcagtgagctatgattgcaccactgtactccagcctgggtgacagagcaagaccctgtctctaaaaagataaaaataggcctggtgcggtggctcacgcctgtaatcccagcactttgggaggccgaggtgggcagatcacgaggtcaggagatcgagaccatcctggctaacatggtgaaaccccgtctctactaaaaatacacacacacacacacaaatagccggacgcggtggccgggcacctgtagtcccagctactctggaggctgaggcaggagaatggcatgaacctgggaggcggagcttgcagttagcggagattgtgccactgcactccagcctgggggacagagtgagactctgtctcaaaaaaaaaaaaaaaaaaaaaaagataaaaacaggctggacgcggtggctcacgcctgtaatcccagcactttgggaggccgaggctggtggatcacctgaggtcaggggttggagaccagcctggtcaatatggcaaaacctgtctctactaaaaatacaaaaattagctgggcatggtggcacgcacctgtaatcccagctacttgggaggttgaaggagaattgctgtaaccaggaggcagagattgcagtgagccgagatggcagcactgcactccagcctggtcgacagagcgagattctatctcaaaaaaagagagaaagaaaaaaaggataaaaatacataaaatgaaagaaaagaaaacagggagacaaggggagagagtgtatgttagttacctaggactgctataacaaaatactagaaactggtgatttttgacaatagaactttattgtacagtttgggagaccaggagtccaaaatcaaggtgtcgacagggccatgctccttctgaaggacccttccttgcttctccctggcttctggtggtggccagctatccttggcttgcagctgcatcactccaatctcagcttccgtcgtgtagccttctttgcgtgtgtctgcctctgtttctgaatttcctccttcttcttttttttttcctttttgagatggagtttcactcttgtcacccagcctggagtgcaatggtgtaacctcggcccactgcaacctctgcctcctgagttggagtgattctcctgcttcagcctcctgagcagctgggattacaggtgcccacaactctgcctggctaatttttttgtatttttagtagagacggggtttcatcatgttggccaggctggccttgaactcctgacctcagctgatctgcccacctcagcctcccaaagtgctgtgattacacaggcatgagccaccaagcctgccatttccctcttttttttttttttgagatggagtttcgctcttgttgcccaggctggagtgcaacggtgcaatctgggctcactgcaaccactgcctcccaggttcaagtgattctcctgcctcagctcccaagtagttgggattacaggcacccgccaccacgtctggctaattttgtatttttagtagagacggggtttctccatgttggtcaggctggtcttgaactcctgacctcaggcgatctgcccaccttggcctcccaaagtgctggaattacaggcgtgagccactatgcctggccattttcgtcttcttataaggacacgagtcacattggattaggacccaccataacgcaggaggacctcatcttaagttgatttcatctgcaaagactgtatttccaaataaagtctcattcacaagttccagatgggcatgaatttaggggaggggacactattcaacccagtccagggggctcttttagagagggagttcatggaagcatggaaggcttcttggaggaggcaatatatgatcagaggcctgattgaagtcaaggggatctggggcaggagcattctaagtggagggaacaacgtgtgcaaaggtcttggggttgggctgtgcctgttttgttatctgttctggcatcataacagggtctgtgtgtacagctggaaggaagtgagttgatgtgggagaggtgaggacagggaggtgacagggacaggtcatgaagggccttgtgggctgcaggaaggacttgggcttttaccctgaggaggtgggagccatggaggactgtggacagaggaaggatgtgagaccccagagaaggacaagacagcacaagggcaggctagggtccgggtttggtatctcacagaaaccccacaatctcctggtgttggacactttatctcactcagataaaaatacataaaatgaaaggaaagataaaaataaataaaaagaaagaaaggataggccaggcacggtggcttacgcctataatcccagcactttgggaggccgagtcgggtggatcacctgaggtcaagagttagagaccagcctgaccaacatggtaaaaccccgtctctactaaaaatacaaaattagccaagtgtggtggcacatgcctgtaatcccagctacttgggaggctgagacaggaaaattgcttgaacccaggaggcggaggttgcagtgagccgagactgtgccattgcactccagcctgggcaacaagagtgaaactccataaaaaaaaaacaaagaaagaaatgataaaaataaattaaagaaaagaaaacagggagagaaagggagagagtgtatgttagttacctaggactgctataacaaaatactacaaacttccagatgaggtctggtgagtttaactccccaggatcacacaattgctcagtggtagatgcacagttcaaatccacactggtgtgtggcatcaggaataacctatgagagtgttcatagtgtccatgaacattgtattcactagcttcaaactcctgtcactgatagttatttatttatttttgagttggagtctcacactgtcacccgggctggagtgcaacagcatgatctctgctcaccgcaacctctgcctcttaggttcaagtgattctcttgcctcagcctcctgagtagctgggattataggcacgtgccaccgcgcctggctaattttttgtctttttagtacagacggggttttactacgttggccaggttggtcttgaactcctgagcttgtgattcacctgcccgggcctcccaaagatctgggattacaggcgtgagccaccgcacccagcctatcactgatatttatgatgtcacctccatggcactttgttggttgacaatacctgggatatctccattatagccctgttcgtgggcacagagttctctgccatggctggggactaggaagtgggaaagagctctaggggaacctgagggcttgggtggaagactggagagccaggaggagcaaggagcaggaagcaaggtggtaatgatgagaggctgagtcttccttcccatgccttgggtgggacatttctggtctctgacacaggagggcatgcagacctgggttaggctcctctctcccccacacaggtccggttggatcagcttattccccctgcagcttaactacctccatctcccttctgggatctcatgattgcctttaattggggccttggatgcccgggtcgtgttgcatggaactgcggccaagtgaggggattaagcaaagctgactaggatcgtttcatgcagatcttttcagagcctttaatagacacctgtgctttgcacagctttctcaaacttacttaactcctttgatattttttcctctgtagcattttggggtaccaggggtttctggaagggatacaggaatcattgctttaactcaaagagggtgcctgaatggtggaatttcaggcagggacttctggctaagcatcaaaggtttcctcctgctcctccctctctgctttcccttcccaggacccgggcactgagaacaaggctggcaccccacagctctctcaggggtggcccagtggggttgcaaattctaggcaggccaaattaggagctcacagggaggctggagggggtcagcccaggcagggctgggggctgggcttgggatgaacagggggactgaacagagaggcagcattctgaactggagttctgtgcctgtcccttgatctctggggggtctggaggcaggcgtgtcttctgggaaggcagcggagtcccctgggacaaagcccagggattagctcagtagacaaacatctgagtcttggccccctcttcccccgagtccagggtcacagtgggaggccgcagattggccctgttcttctgaaagtaaacaggcagtgctggcctggcttcccctacatccagccgccaggccttcgtgtccagcccctttgtgcggcggctccagcctctcagcctcctggcctttcactttctgcctcctccgtctacacccgctgacctcttgaagcgtctctagtgatggggaccctgggggcttggtcactccagtcctcgcttttgtgtgtgtgtgtgtgtgtgtgtgtgtgtgtgtgtgttttgtttgtttgtttttttgagatggggtttcgctcttgttgcccaggctgcaatgcagtggctcgatctcagctcactgcaacctctgcctcccgggttcaagcaattctttcgtctcagcctctccagtactgggattacaggtgcctgccgccacactcggctaatttttgtacttttagtagagatggggttgcaccatgttggtcaggctggtctcgaactcctgacctcaggtgatccacctgccttggcctcccaaagtgctgggattacaggcgtgagccaccgcgcccggccgcccttgtgttttattactgggatgctctagaggagccagagggaggcaggttcagggctgactgccccgccatacagtgtgtgtgtgtgtgtgtgtgtgtgtgtgtcagggggttatttttaccgctgttgtgtcagagacttgtgaaccagagtgactccatcttgaataggggctgggtaaaatgagcctgagacttactgggctgcactcccagacagttaaggcattctaagccacaggatgagaggggagtttggcacaagatacaggtcataaagaccttgctgataaaactggttgcagtaaagaagccggcccaaacccatcaagaccaagatgatgacatgagtgacctctgattgtcctcactgctacactcccaccagccccctgacggtttacagatgccatggcaacatcaggaagttaccctctatgctctaaaaacgggaggtatgaataatccaccccttgtttagcatatcatcaagaaataaccataaaaatgggcaaccagcagctcttgtctgtggagtagccattcttttattcctttttttttttttttgagacggaatctcgctctgtcccccaggctggagtgcagtggcacgatcttggctcactgcaacctccgcctcccaggttcaagcaattcttcttcctcagcctcctgagtagctgggattacaggcacacaccaccatgcccagctaatttttgtatttttagtagagacagggtttcaccatgttgtccaggctggtctcaaactcttgacctcaggtgatccgcctgcctcagcctcccaaagtgctgggattacaggcatgaaccactgcacctgcctttttttttttttttttgagacagagccttgctctgtcactcaggctggagtgcagtggtgtaatcttggcttactgcaccctctgcctcctgggttcaagggattctcctgcctcagcctcctgactgattgagattacagatgtgcaccaccatgcccagctaattttttgtattttcagtcgagacggggttttaccgtgttggccagactggtcttggattcctgacctaaggcgatgcacccacctcggcctcccaaagtgctgggattataggtggaagccaacgcgcccggcctcctttacttccttaataagcttgctttcactttactccgtggactctccctgaaatctttcttgcgggggacctaagaaccctcttttggggtctggatcgggacccttttccagtaaaagttggtgttattggcagtgaggtagggaagctgcggctaagctgaggctgcacagggaaggtgtcttgaccttgaacttgacaccttgaccttggacccttgcctaggctctgagggccagctcctttccctctctctaccttcccccacctctggctcttggaagtgcacctgcagctgctgtgggaggagccctccagccgccctgaggatggtttcctgcctcccttcctgccccctctgaagaccaacttagctatgcccaactcagctcttgtcctgggacaaggccccctgcctcctggtcaagggagcagggtcctggggagggagagacagatgtcgaggctggacaggaggttgtggaaggggaggaagtggatttgggagtatagctttctttcttactcagttatcattagtataacttttctcccttccttccttccttccttccttccttccttccttccttccttccttccttccttccttccttccttccctcccttctttccttctctctctctcttttttgctttcttgcttgctttcttgtttccttttttttttgagatagagtcttgctctgtcacccaggctgcagtacggtggcgccatctcggctcattgcaacctccacctgccaggttcaagcgattctcctgcctcagcctcccaagtagctgggactacaggtgtgtgctatcatgcccagctgatttttgtatctttggtagagaaggggtttcaccatgttggccaggctggtcttgaacccctggcttcaagtgatccacccccttggtctcccaaagtgttgggattacaggcgtgagccaccctgcctggcctcttttttttttctttttgagacagggtttcactctgttgcccaggctggattgcagtggtgcaatccagccttgaatgtctgggctcaaatgattctcccacatcagcctcctgagtagctggaactatcggcgcatgccgtgacacccagctaatttttattttttgtagagatgggatctctctcaaattcctggcctcaagtaatcctcttgcctcagcctaccaaaatgctgggccttattattgtaatgttttttcctttcatttaagtaaaaattaaagtgtaatttactggccaggtgtggtggcacaggcctatagtcccagcactttgggaggctgaggcgggcggatcgcttgagctcaggcattggagatcagtctgggcaacacagtgagaccttgtctctacaaaaaacaaaacagaaaattagctgggcatagtggtgtgcattcgtagttccagctaattgggaggctaaggtgggaggatcacttgaatccgggaagtcgaggctgcatcaagccaagatggccccactgcactttagccaagaccctatcacaaacaaacaaacaaacaaacaaacaaacaaacaaacaaaaaaacaaaaaaaccagtgtaatttactgacagtgaaacccatacatattagtatacgattctgtgatatttgacaaaccacacaaccctataaccacaacctcaatagaaatacagaataccggccaggcctggtggctcacacttgtaatcctagcactttgggaggctgaggcgggtggatcacttgaggtcaggagttcaagaccagcctggccaacatagtgactctctgtctctactaaaaatacaaaaattagccgggcatggtggtgggcacctgtaatcccagctactcaggaggctgaggcaggagaatcgcttgaacctgggaggcggaggttgcagtgagccgagatcataccactgcacctcagcctgggcaacagagcaagactccatctcaaaaaaaaaaaaattaaaaaaaaaaaaaaagaaatacagaatacctttttccctcccaattcctgcaattcctgcgtgcccctctggagtcaatttctctccctcagtcccagcccctggcccctgctgacttcctctctgttgctatatttctgccttttcccaggatattatgtcaatggaatcgtaccataggcagcttttggcgcatacttcttccaggcagcagaatgcatttgaggcttattcacgttgttgggtgtagcattttttgtttcttttactgttgaggagtccctggtatggatgtgtcaccatgcatccattcatttgttgacagacacgtgagttgtttccagttttggtgacgaatgcccaaattcataggcgatgataaataatgtgccagacgttgatgtgcaagttttggtgtgagggtaagtttccatttctctacggtgaatacctatgagtccttattctctctctctgtctctgactttctctttctctctttatttatttgtttatttatttttatttattagacagggtcttgctctgtcacccaaactggagtgcaatggtgcagtcttggctcattgccacctctgcctcctgggctcaagctattttcctgtctcagcctccagagtagctggaattacaggtgcgcaccaccacacccagctgatttttgtatttttagtagagagggggtttcaccgtattgcccaggctggtgttgaactcctggcctcaagtgttctacccggctcatcctcccaaagtactggtattacaggcatgagccaccacacccagccaaaaccagccttttaaaaaaattttattttcggctgggcgcggtggctcatgcctgtaatctcagcactttgggaggccgaggcgggtgaatcacggggtcaggagttcgagaccagcctgaccaacatggtgaaaccccgtctctactaaaaatacaaaaattaactgggcatggtggcacacgcctgtagtcccagctacttgggaggctgaggcaggagaaatgcttgaacctgggaggcggaggttgcagtgagccgagattgcgccattgcactccagcctgggcaacacagcgagactccatctttttttttttttttttgaaacagagtcttgctctgtcgcccaggctggagttcaatggcgccatctcggctcaccgcaacctctgcctcctgggttcaagcaattctcctcccttagcctcctgagtagctaggattacaggcatgcaccatcatgcccagctatgtttttttttttaatttttatttttagtagagacggggtttcaccatgttggtgaggctggccttgaactcccgacctcaggtgatcagcttgccttggcctcccaaagtgctgggattacaggcgtgagccaccatgcttggctaatttttgtatttttaatagaggtgaggtttcacccttttgcccaggctggcctcgaactcctgaccacaagtgatccgcccaccttggcctcccaaagttttgggattacaggcattagccattgcgcctggcctatatggaggcttttgtatggagagacaggacactggtcccctggatactggagggggacagtcagggatagagctggggccaaggggaagatatagaagtgcgaatcaggtgaggtataggacagggtgcctggaggggaggccagaatcttcattctaaccaaatccttgcctagtttttaaaaaaatgggcaaggctgaatgtggtggctcatacctgtagtcccagtactttaagaggccaaggcagaaggatcacttgagcccaggagttcgaggctgcagtgagctaggactgtgcactccagccgggtgtgatgacgcacacatataatctcagctctcagaaggctgaagcaggagagtcacttgaatccaggaggcagagattgtagtgagctgagatcacaccactgcactccagcctgggcaatagaaaaaaaaccaaaaccaaaccaaaacaaaaccttaaacacaaagttaccatagaactcagcaactcctgaggtcaggagttcgagaccagcctgaccaacatggtgaagccccttctctactaaaaatacaaaaattagcagggaatggcggtgcatacttgtagtcccagctacttgggaggctgaggcaggagaatagcttgaactggggaggtggaggttgcagtgacccgagattgcaccactgctctccagcctaggcgacagagtgagactccatctcaaaaaaaaaaaaggccgagtgcagtggctcacgcctgtaattccagcactttgggaggctgaggcatgtggatcacctgaggtcaggagtttgagaccagcctgaccaacatagtgaaactccatctctactaaaatacaaaaaattagccaggcatggtggcagatgcctgtaatctcagctacttgggaggctgaggcaggagaatcacctgaaccagggaggcggagattgcagtgagctgagattgcgccactgtactacagcctgggcgacaagagcaagactaaagatggtctcaaaaaaaaaaaaaaaaaaaaaagaaaagaacagaaaaagaaaaacaaaaagcctccacatagtccccttgctcttgtagaacagagaaggacttcatagacctttccccaacacaggttagtgccagcatgaccttgccaggccaccttaatagagcaaagatcagtagatgctatgggaagtcaaattttctcaacattagaaactctttccaacacacagaaaaatggaaagaattgggcacaggcacactcacccctagattctacaacgaactcattgccattccgcggtaaacgctaagccaggcgtcacacgctatgctgtgtgatgctagaagtgcgcacacttatcctgttggtggtggaatttacacgtgcgttcatgagtgtgcacgtgcgttagccgctgtgtgcatttgtgggcgtgcaaagggatgtgcctgggggaaaacctcacacagtggttaggaagcctgtgcagttgaactgtgggggctcccgtcttgcttctgccacttaaggactgtggggccttgggcgaattgcccaacttctctcctgcccgtttcctctttcagtgtggattcattcattcaacaaatatttacggaacgaacacctcctgcgtgccaggctccattccaagcactgggggttgcagcggcgaacaaaacagacccaaatgcctgccctggtgggccaggaaggcagaaataaagatgaagagttggtcaagtctgcagtatgtcacagggtggtagggctgcgtttgtgtacatggggaagaggctgcagctttagaggtggggggacctcccggggaaggtgaggagagtgaggtgcttctagggggatggaggggaggggagagtctttctggcagagggcaaagcaagtgcaaaggccctgaagcaggaatttactttgctgtttttttttttttttttgagatggaatctcgctctgttgcccagactggagtgcagtggcacaatcttggatcaccgcaacctctgcctcccgggttcaagggatcctcctgcctcagcctccgagtagctgggattacaggcgcacaccaccatgcccagctaattttttgtatttgtaatagagacaggctttcaccacattggccaggctggtctcaaactcctggcctcaagtgatctgcccgactcggcctcccaaagtggtgggattgcaggtgtcagccactgagcccggcctacttggctgtttaaggaacagtgaggaggtccatgtggttggagcagagtgatagaaggggtgagaggaaggagggcaaaggcagagaggtgacagtgggtgttgtggggaaggagagcttgcaagatctcaagagttacaggcatggcaggccaggcatggcggctcacacctgtaaccccagcactttgggaggctgaggcaggaggatcatttgagcctggaagtttgcgaccagcctgggcaacatagcaagacccctgcctctacaaaaacaaaacaaaacaaaacaaaacgcaacaattagccaagtatggtggcatgtgcctgtagtcccagctactcaggaggcaggaagatcgcttgagcccaggagtttgaggctgtagtgagctatgatcgcaccacagcaatacagcctgggtcacagagccagaccatctcttaagaaaattaaaaaaaaaaaaaaaagatttgcagaaagtactcaagcttttaccctgggatgtgttgagggtgtcctctctggctgctgggtggatgataatagcacctacctgaaggagttgttggaaggacgacatgaattaatatgtgtaaagtgataggccagtgtctggcatataccacacatggggtaaggattagtttatttttatatgcggtaggcgtgtgtgtgttgggtgtctctgggcggcagctgagccaggtggccattagtgagtttgttgttgtgaaagaatctctctaacactatttaaaaaaccctgctgggtgtttaaaagccctactggggttgccatgttttggctgggtcccggctcttttgtataacagatgttacccagatgtcagctggggtcaatagagcctcagagatttggcgtctgcctctctcccacgacctgtgggaagcctggtgccctctgtgagatgcttgtgaattcccagggcctctgttctcatggttgcgtcttggcctgagttcctgcccgctgaactcttgccctcacccaccttcctggggccagtgctttgcgggtgaaccggtcctgtgttcttgattttcccccagatcactcttgcacatggactgcctgcaggttgcctctcaagatactgtgctctcccagtctggccaatgtagcaagaacctattgttcctgctgtagttttttttttttttttttttaccattgcttgagcttctgcataagatgttgcttgacaaagcattccaccaccaacaggaaaagtttacacacttgttgcataacacagcatagagcgtgatgaccggcttggagtttaccaggctgtcctgtgaaggggaagttcacttaggacacccggggccaatggctgtgagcagcagaaggtgcctttgatgtcaagctgtcttgaacgctgctgctcccgggtgggtaagagctggcacagtccagaaaaattgaggcggcgacacgatgagagacagcaacccatccccagacaaacctcaagagaccagaagcagccacattgcaccagacttctggaaaattaggcaagcgttggcaacagaatatgttgtggactcttctcacagtttctgtaatcattaactgctttctcagggtgtggatattcaaggaccagaggtcaaagttacagcaacagcaccttgcaaggggcaggggtgaggagaacctccttgggcaggtcgtgctgtatgggataagcccagaactggtttagttctgagacgagggtgcagatagtattggaaagatgcatatcactcaagcctggaagaagaccagggttacacttaaccttgactgcagttcaatgcctcggtaatatggactgaattgtaactaagactgttctctgcaaggtttgcttggtttctgcatctttgtaattgtagcatttggtgttcacttgaaggatgggtcttcaagagcatattctccaatgtttctttctcacggctcaccacaacctcgacctcccaggctcaagtgatcctcacacctcagcctcccgcgtagctgggactactggcatgcaccaccacacctgactaatgtttgttttttttttgtagagatggggtctccttatgttgctcaggctggtcttgaactcccaggctcaagcaatccgctcacctcagcctccaaaagtgctgagatcacaggcgtgagccatcatgcctggcctctccagtgtttcttaaatgtttctggaccacatacttgtttaggaattcacccaaatctaaagaccactgctggcccattgccaaaattcctcccaccccaaatatatttacccaaaagattttgcagatagttgtatggtattgtggtgctgcaaaattttatccacagagcccattccaattctgggttcataacctctgatctagcttggttctcttattttacacatggggaaactgagtcaaaagagcacaaagacttgctcagggttatgaagacacttcatgacagcccttggtgtcagagtaagaactggatgtgagttcccttaccagctgagatgtcttctctctgtgcctcagtttccctatctgcaaagccaggataataatagcacttacttggtagggatgctatgaggatcacatgacacatatgtgaagcatttagaaccaatgccttaataaatgatagctttttttttttttagagagagcttctcactctgttgcccaggctgctggagtgcagtggcacaatcacacctcattgcagcctcaaactcccaggctcaagggatccttccatctcagtttcctaagtagctgggaccacagatgtgcaccatcatgcccagctagtacttttttttacattttatgttttttgtagagacagggtcttgctatgttggccaggctgatcttgaactcttgggctcaagtgatcttcctgccttagcctcccaaagtgctgggattacaagtgtgaagccaccatgcctggcctatggctctaatttttatcaccgttctctttttttttttttttaagtgtagacccgagttgattctttagcctgtagctaagtcaaagtttgaaccaaagaactcctgccacctagtggttctgtgatgaataaagtagggtttgcagcactgaaacatggtgatcacatgcatgtctttgcctgtgtggttattgttggggaattagtggctatgtctctttccaaagagagtgtgtttacacattgtatctgttagcctttgctgtgtaacaaactaccctatggattgcaaccatagccacttattaacccttgattctgtgggttggcaacttggttgagtttagccaggcggttcttctgtcggtcttgcttgggcccatgcatgtggctacagttagctggtgggttggctggggctgactaccttggattgcttcactcatgagtccattagcaggctgtttgctggggtgccttggttctcctccacgtggcctctccggtgggcttgctcaagctcattcccatggtggttgcagagttgctaggaaaagcagagaatatagccctaatgcgcaagaacttccccttgtgtcatgtttggtaatgtctgattggctaaaacaagccatatggtcaaacccagactcaggaagtaaggaaacagaatctatctcttgactggaggaaatgacaaatattgtaaatattggggctgttcttcccactccccaatctgtcacacatgtttgctggcgagtggttgggtgttgaatcgtcagtttcaacttaaaggattttgactcttttttttttttttgagacagggtatctccctgtcacccaggctggagtgcagtggtgtgatcatagtttactgcatcctcaacctcctaggctcaagctctccccccacctcagcctcttgagtagttggacccataggcatgcaccaccacacctggctaatttgaaaattttttgaagaaatggggtctccctctgttgctcaggctggtctcaaactcctgggctcaagtgaagttcctgcatcagcctcccaaagtgctgggatcacaggcgtgagccatcacacccagctaaggattttgactctaaagatatgttttcacatgttttcacttctcaaaagaagagagtttataagtagagaccataacttccaggctagcccaccagtcttatgatggaaaataacttcctctctatgggatgtgatggttaattttatgtgtcaacttgactgggccataagacacccagatatctgggttaaacattatttctgagtgtatctgggagggtgtttctgggagagattagcatttgcattggtggactgagaaaagcagatggtgctccccaatgtgggcagacctcatccaatctgttgagggccagactagaacaaaaaggcagagaggaaggttgaattctgtctgtgtcaaactgtggaatagggacattgatcttctacccctggtgctcctggctctcaggccttcagacctggcttggaatctgcatcattggctctcaggctctccaacctttgaacaataccatgaatcttcctgggtcttcagcttgcagaaagcagatcataggatgtctcagcctccataatcagatgagccctgtaattatataatccttataataaatctcaccctggatctctctatctctttctgttgctgtcgctctctctccacctttctgatcagctattgattttgtttcttgggagaactctgactaattcacaggacatttccatttcttcgtttattgtggggttctctctctcagccatttgcattcccccaacacctccttccctcattatggattgaattgttccaccccaaatgcacgtattgaagccccaaaccccagtgtgactgaatttggagatagggcattgattgattgattgattgattaattgagatggagtcctgctctgttacccaggcaggagtgcagtggtatggtcttggctcactgcagcctccacctcctgggttcagatgactctcatgcctcagcctaccaagtagctgggattacaggcgattgctaccatgcccaactaatttttgtacttttagtagagacagggtttcactatgttggccaggctggtctccaactcctgacctcaagtgatccacatgcctcagtctccgaaattgctgggattacaggcatgagccaccgtagctggtaatagggtcaacttgtacatgtatttcaactcatttccagcggaggtcagtcaagaatctcattctattaaagtcagtctatgctatgactttgaagtctgttgcccaggctgattgcagtggagaccatggctcactgcagcctcaacctcccatactcaagagatccttctgcctcagcctcctgagtagctgggaacacaagtgtatgctaccatgcctggctattaaaagaattttttttttgtagagatgggggtcttaccgtgttgcccaggctggtcttgaactcctgggctcaagcaatccttctgcctcggcctcctaaagtgctgagattacactcttaaaccaccatgtccagccagatgacttttttttttttgactgagttttcgctcttgttgcccaggctggagtgcaatggcatgatctcggcttaccacaacctccgcttccctggttcagaggattctcctgcctcagcctcccagtagctgacattacaggcaaacgcctccattcctggataattttgtatttttagtagagatggggtttcgccatgttggtcaggctggtctcgaactcctgacctcaggtgatcccaccctccccccatcccccacctcagcctcccaaagtgctgggattacaggcataagccaccgcacctgtccagctttccattttcttacttatcaattatctcactgtatgagatacaatttccttaattctgttttattttaagagacagggtcttgtctgtcgcccaggctggagtgcagtggtgcaatcatagctcactgcagcctcaaactcctgggctcaagtgatcctcccacctcagcctcctgagtagctgggacctcatgtttgcaccaccacacctgggtgatttttttttttttttttttaagatatgggggtctagccatgttgcccaggctggtcttcaactcctggccataagctaatcctcctgcctaggcctcccaaagtgctgggattacaggcatgagccacagttcctggctcctacattactttttctgatcatgttgtccccagcctcagctgtgattggctccaaaccccagctcccagccaacacctcatcttttggttacagtgattggctcaggagtgagtgtgtaacacacccagagccaatgagaggcaaggacatttgctggggattctgggaaagtacacctccctttttctttcttgggagcaattgaaagagaccctcgagctggccctagagggtgtgggtaggagaatgggagaaatggcagtgactgctttgtggactactggggaaggattggggcgttagctgcaatgtggagcctgaacataaagcccaggcagccagtgatggcagaggagaggcaccagagccttggtgaggtctggtggatgcctggatcaagcctcacctgaagcagctagcttttcagttatgtgggtccatatttactgtgaaaacgaagatgatattaggttgatgcaaaagtaattgtggtttttgccattaaaagtaactggaaaaccacaattagttttgcaccaacctaaataatatgtgacattgtatagctcctactacatgccagacccttatttttttttctttttttttgggggggatggactcttgctctgttgcccaggctggagtccagtggcgcgatctcggctcactacaacctctgcctcctgggttcaagtgattctcctgcttcagcctcccgagtagctgggattataggtgtgttccaccacacccaactaatttttatacttttagtagagatggggtttcaccatgttggccaggctagtctcgaactcctgacctcaagtgatctgcccacctcggcctcccaaagtgctgggattacaggcgtgaggcactgcgcccagcctaaccacttgccttgtattaatctccattgcacagatgaggaagctggggcgcagagaggttaagcaatttgtccaaggccacacagctggcgtggccagaaccaggattcctggacccctcaccttgtgttcagttctgccacttgcttctgtttttacacccaaaggagttctgactgtttcccagtaatgccagaggctgcataactggagagaggaagtaagagccactcttcctttgcctagaaccgtcagtggctccccgaggcccctgggttaaagaccacaatccccactgtggccggcaagccctgcacaatgcagttccctctatcacttcccgtcctgtctcccactgctgtccccacgtcactcagccctcaccgagctcctctttgtccctccaatttgccaaacacctcaggacctttgtctgtgctgttccctctgtctaaaatgcccttcctctgctgctcctcctaaaccaagagcaaatgcgtatcctcagagaagtgacccctcacagccttcctcctgacccggatctaggctaggaaaacccaggcaggaagaacacaggccctgaggcagctggccccagttcaaatccgactccatgactgccttgctgtgtgaccttgggcggataccttgatcgctctgtgcctcagtttcctcatctgtaaaataggatgttaataggcaggtactcctgccttataagtttgggtgaggatcagaggaggctattatgtggaacgtgattagaacaatgctgaactcagttatgcaggcagctaataacagtagtgtaaaggcaagggttggtgcactattcacaatagcaaagacatggaatcagcccaaatgcccatcaatgatagactggataaagaaaatgtggtacatacacaccgtggaatactatggagccatacaaaggaatgagatcggccaggcgcggtggctcatgcctgtaatcccagcactttgtgaggctgaagtgggtggatcacctgaggtcaggggtttaagactagcctagccaacatggtgaaaccttgtctctactaaaaatacaaaaattagctgggcatggtggcaggcgcctgtaatcccagctacttgggatactgaggcaggagaatcacttgaacccaggaggtggaggttgcagtgagccgagatcgcaccactgcactccagcctgggggacaagaaggacattctgtccccgcacccccccccccaaaaaaagggaacgagatcatgtcctttgcagggatgtggatagagctggaagccatcattctcagcaacctaaaccaggaacagaaaaccaaacgctgcatgttctcacttataagtgggaactgaacaatgagaacacatggacacagggaggggaacaacacacacacacacacacacacgcacacatgcgcgcgcgcgcgcgcgcacacacacacacacacacacacacacacacacacacacacaactggggcctgttgggggagggcagggtgggagagcatcaggaaaaatagggaagccaggtgcggtggctcgtgcctgtaatcccagcactttgggaggccgaggcgggtggatcacgagatcaggagatcaagaccatcctggctaacacggtgaaaccccgtctctactaaaaatacaaaaaaaattagccgggcatggtagcgggtgcctgtagtcccagctacttgggaggctgaggcaggagaatgctgtgaacctgggaggtggagcttgcagtgagccgagattgagccactgtactccaacctgggcatgagcgagactccgtctcaaaaaaaaaaaaaaaaaaaaaaaggaaaaatagggaatgccgggcttaatacctaggcgatgggttgacaggtgcagcaaacccccatgacacacgtttacctatgtcacaaacctgcacgtctcgcacatgtaccctggaacttaaaaaaataaataaataaagggaagggaagaatgggaagctagtgtttaatgggtatgctgttttggttttgcaagatgaagcattctggaggcggatggtggtgatggttgcacaatgtgagtgtgcttaatgcctctgaactgtatggacgctgagaaatgattaaaatggttagttttacattatgtatatattactacacaaaaaaggcagatgtggctgggcatggtggctcatgcctgtaatcccagatctttgggaggccgaggctggcagatcacttgaggtcaggagttcaagaccagcctggccaacatggtgaaaccccatctctgttaaaaatacaaacaaaacaaaacaaacaaacaaacaaaaaacccaaaactagccaggcgtggtggtgcatgcctgtaatcccagctacttgggaggctgagggcaggagaatggcttgaacctgggaggtggagatttgcagtgagtcaagaccatgccattgcactccagcctgggcaacaaagtgagactctgcttaaaaaaaaaaaaaaggcagatgtaaaaaaagtaaaattgtgatttcaggaagcccctatcttttctttcaaggcccttatctcaccctataattaagcatatttatgtatttttatttatttagttttgagacatgatcttgctttgtcacccaggctggagtgcagtggcatgatcatggttcactgcagccttagactcctgggctcaagtgatccttccacctcagcctcctgagtggctgggaccacaggcaggcaccaccacacctggctgactttcgtatttttttttggagagatggggtcttgccacgttgcccaggctggtcttgaactcctgggttcaagcaatcctcccaccttggcctcccaaagtgctgggattacaggggtgagtcaccacacctggcaattaagcaatttttttttgagacaaagtctcgctctgttgcccaggctggagtgcagtggtgttatcttggctcactgaaacctctacctcccgagttcaagcgattcttctacctcagcctcctgagtagctgggattacaggtgcatgccatcacgcctagctaattttttgtatttttgttagaaacgggattttgccatgttggccaggctggtcttgaactcctgacctcaggtgatccacctgccttggcctcccgaagtgctgggattacaggcgtgagctaccgtgcccggcataattaagcattttcaaagcataatttttccatgagcgcctgtcttgccggctctgctgtatgggtcctgttttactgaactttggttttcttggtccagcccagtccctgggcagggtggggaaagcagtttgcctcacattgtctgcagagaattgaaaagcaagaataaaaatcaccagaaggcagtctgcttttatcattcacatatgcccagaattctaaagaatgttagtaataaaataccctgaaaaaaaaaatcttttggccgggcgtggtagctcacgcctgtaatcccagcactttgggaggctgaaatgggcagatcacctgaggtcaggagttcgacaccagcctgcctaacatggtgaaaccccgtctgtactaaaaatacaaaaattagccggtcttggtcgtgggcgcctgtaatcccagccacttgggaggctgaggcaggagaatggcgtgaacccgggaggtggaggctgcagtgagctgagatcatgccactgcactccagcctggccagctgagcaagactccgtctgaaaaaaaaaaaattggttccaaaaaattactgcggttacagctgaggtttttttttttgtggttgtttgttttgataacttttacattttgaaatagtttaagacttacaagaagctgcaaaaatagcacagagctctcatgtcccctgcacccagcttcctctaacaagatcttacatgaccacagtccagtgtcaagatcagcacattgcatgagtgagttagccctacatggatgggtataaagaaattaatagaggctgcgtgcggtggctcacgcctgtaatcccagcactttgggaggccaaggcagggggatctcctgaggtcaggagtttgagaccagcctggtcaacatggcaaaacccgtctctactaaaaatacaaaaattagccgggcgtggtggcacgcgcctgtaatcccagctactggggagtctgaggcaggataattgcttgaacatgggaggcggaggttacagcgagcaaagattgaaccactgcactccagcctgcaagatggagtgagattctgtctcaaaaaaaaaaaaaaaagaagaaagaaatagaaataaaaggaaactcatgctaaaaaaaaagatcaggacattgatgctgatagaatatgactgattctctccagtacagaatttacttggatttctctagttactatttattttcataatttacgtatttatttatttgaggtttcataatgtacatgtaaacttcaacttagcgcattttcatcatttattcttggtgaactttgtgttctccatggaaattaattcagagaaattcccatgtacagaggcagtccacataagcggatttaattatccactttctttttcttaaatttatttttagttattgtggaaccataataggtgtacatatttatggagtatatgtgatattttgataaaaacatacaatgtgtcctgataaaatcagggtaattgtgacgtccattaccccaaacatttatttgtgttaggaacgtttcaattacaattgtttaattatttcaaaatatataataagctttttttttcttagatggaatcttgctctgttgcccaggctggagtgcagtggagtgatctcagctcactgcaacctccgcctcccaggttcaagcgattctcctgcctcagcctcctgagtagctgggattacaggtgcccaccactaggcccagctaatttttgcatttttagtagagacggggcttcaccatgttggccaggctagtctcaaactcctgacctcaagtgatccactcgcttcagcctcccaaagtgctgggattaccggcgtgagccactgcgcccgaccttcaataagttattgttaaccatgggtgccctattgtgctacggaacactaggtattatttcttctatctaacttttttctttctttagagacagggtctcgctctgttgctcaggctggagtgcagtggggagatcacagctcattccagctttaaattcctggactcatgcgatcctcctacctcagtctcctgagtagctgggaccacaggtatgtgccaccatgcctggctaatttttaaacttttaatagagatggggatctcacgatgttttccaggctggtcttgaactcctggcctcaagtgatcctccctctgcggcctcccaaagtgctgggatcacaggtgtgaaccactgtgcccggcctctaactatattttggacccattaaacattccttctccctcttcctcctcactacccttcctggcctctggtagccatccttcaactatctactttcatttggagaaacaatggtttggaatggcttgagtgtctctaaacctcatgatagtataatacatctacgtcttcctggatttagactagaaagaaataataaaagatgatttaaagatgaaaacacagaacttgaatgacttcaattctgtactttgctgtgaccactgggagatttttttttttttttttgaaacggagtcttgctctgtcgccgaggctggagtgcggtggcgcgatctcggctcactgccagctccgcttcccaggttcacgccattctcctgcctcaggctccagagtagctgggactacaggcgcccgccaccacacccggctaatttttttgtacttttagtagagacggggtttcaccgtgttagccaggatggtctcgatctcctgacctagtgatccactcgcctcggcctcccaaagtgctgggattacaggcttgagccaccgctcctggctgggagattttatttgtattgaaaccagcggagcattgcaaaccgttaggtgtagatgtttgcaagtgtaaattttagttcatacatgaactctagtgccgaattcgaatgatatctttaaaatggcaacttacgctttaaaatttgttcattgttttcacgctaaagaatgaggcaagaaaataaaatgttacatcattttacatcagtctttacaccattgatttagtgacttgctggaattgcgctgcttgcagatatttcggttttattaaagttcccttagttattggacaattatttacataaaatacgattatatcagacattaaccaaattttcagtgtctgcatttctttctttctttttttcctttctttcttttctttctttctttccctccctccttctctctctctcttctttctcactttctctttctttctttccttttctttcttttcttactttcttccccctccttccttcctttctttccctccctccttctctctctctcttctctctctctttctctctttctctctctttctttcccttccttccctccttccttccttccttccttccttccttccttccttccttcctttctttctttctttctttctttctttctctctctctctctctctctctctctctctctctctctctctctttctttcttttctctttctcagagttttgctcttgttgcccaggctggagcgcaatggtgcgatcttggctcactgcaaccttcgcctcccaatttaagtgattctcctgcctcagcctcccaagtagctgggattataggcacgcaccaccacacccagctaatttttgcatctttagtagagacagggattcgccatgttggccagtctggcctcgaactcctgatctcagttgatctgcccaccttggcctcccaaattgctgagattacaggcatgagctactgcgcctggcctgcatttatttcatggttattgttttatttcatgattattgctgaagatgagtctattttatagagaggagaaattgaaaaatgatcccagctggtgtcaaatacaccaggaacgctgctcgaaataaatgttcaactgcacgcatgttttttccagcacaattcacaattgcaaagatatggaaccaaccggtgtggccatcaatcaatgagtggataaagaaaacgtggtatatatacatcatggaatattattcagccatgaaaagaatgaaataatgtgtttcgcagcaatttggatggagctagggccattattctaagtgaagtaattctggaatggaaaaccaaataccgtgtgttctcacttataagtgggagctaagctatgaggatgcaaacgcatagaatggcatcatggatttcaggcccttggggtgggaaaggttgggaggcggatgagggataaaaggctacatgttgggtacagtgtacattttcaggtgacgggtgctctaaaatctcagacttcaccgctaaacaattcatccatgtaatcaacaccaggccaggcgtggtggcttacacttgtaatcccagcattttgggaggccaaggcaggtggatcacctgaggtcaggagtttgagaaccagcctggccagcatggtgaaaccctgtctgtactaaaaacacaaaaaaattagctgagcatggtggcaggtgcctgtagtcccagctaatccggaggctgaggcaggagaatcacttgaacctaggtggtggaggttgcagtgagctgaggtcgtctcattgcactccagcctgggcaacaagagtgaaattctgtctcaaaacaaacaaacaaaaacaaacaaacaaacaaaccaaaaaaccaaaaaccaaaaacaaaaaccacttttaccccaaaagctactgaaaaaaaaaaaaattatggctggcagtggtggcttatgcctgtaatcccagcactttgggaagccaaggcgggaggattgtttgagcccaggagttcgagaccagcctgggcaacatggcgaggtcccatctctacaaaccagaaaattagccaggcacggtggcacacatctgtaatcccagctactagggaggctgaggtgggaagatcacttgagcccaggaggtcgaggctgcagtgagctgtgttggcgccactgaactccagcctgggtgacagagaaagcgagccttgcctcaaaaaatatttattaaaaaatagaataaaaaagaaaaattaaaagaaaaagaaaaagaaataaatatctgttgaatcaaccaatgaaggagggtgcagttccatacagcgcccaccaggtgccgctgctcccaagcctaggccggctcagcgactctgcagggtgaatctcaaccccagccccgcctcggggtcgcacctcaggacgtctccttttccaatctgcagcgtggctcggcctcctccctcatcgcaaggctcccactctgcccctggagtccagtcaaccccgcagccacttgcagaaattttcctataagcagttctgaccacattcctccacttcctgttgggttcctgggacaggttcctgccgactcttacctctgggcctttgctgctccttctgcctgggatgccctttcattagaaaactcatatagtacttagctccacttcttcctgggggcataccacttaattgctccatgcctcagtttcccctgatgcagaggctggacagagaggctttgtccaagaaaagttcagggccaggaattagacaatctgaaaggcaatggggagccatagagggtgtttgagcaggagagtgtcctcagatgtaaggaaggacagagcctccttccctttgcccctggatctttctagaagggccttacggggttggaatgggagactttagctgtggccagctcagactccacttactgggctcccaggggctggacaagcaggtcttcctccccctgtaccctcctggtggggctgtttactctccagtgatgtccctgagtctgggccatcccacagcacctgctccctgggcagacaccaggtgcggggacacccctggagggaaagccacaagcttcaggctgggggcccgggtgtcacctttacggaagcgccggtgactacctccaccgcgggaggttccacaaggctgatgaggctcacgtgggactcaccggggagacagcgtccagagcaggtgaggacggcatgctgggctggcccgttcagggggctggaggacattcagggaccccacacccagctgctgccccctgcctgtctcaggccctctctctgactctgtctccccatctctgtcccctccaccctctcaactctgtcctttctctctggcgctgtctctctctgggtcttgttcactgtcttggagctctccatgctgtgtctctttctctctctgtgtctccccatgtctctctcgctgtctctggccctctctctccctgggtctctggttcagggggggtctctgtctccgtttgagtctctgtctctctctgtgtctctgcctgtccctgtctctgctgccccatccaagccctgctctcagggtggggagaacaggttctaccctctccgaggttctcttcctcattggcttactctgacccggtccctaagggggaccaccaggcactgcccaggaaggaggagggagcaccaggctgcagaaccccatgctgcctccatctgagaaggccctccatagccacgttctccctacagcccaccttgtgcacaaagccagtgttctccctgcagcccaccttctcccagaaaccctcctgccttctccacgcagcccatcttctctctgaagcccaccttctccccacagcccacctcctcccgcagcgcacctcctccctgaagcccccttcttcctgaagcccacctcttccctgaagcccaccttctccctgaagcccaccttctcccgcagcccaccttctctctgaaacccacctctttccgcagcccaccttctcctcgaagcccaccttctctctgaagcccaccttctcccgcagcccaccttctcccgcagcccaccttctcctgcagcccaccttctctctgaagctccccttctccccgcttgttttcccacctggctccaacctcctgtcctgcctttttacttctacgggtgcagcccccgtacctggccctgctccccacacagcacagctgccgccgcccaatgtttccctgctgcgcccaggcctgtgctaggtgaatggaagagcatggcctccttgcacttctgcaaagcagctaatcctgggcccctatgggtggcaacacctgtgtgtgtgtagcagggaactgaaggggggtctggaggtctccaaagatgatgcctcatgcaccagggagggtctggctgttgtgtggctgtaggggtccttattcttgggacctgctccaggggaggtgggggagtccagcttggctctgtaaatctggtggttaggtgggtccagtcaccgtgctgaaggtctttgtcctgggggttgtctgtggttggcgtttgactattgaggggatccagttgttgtaaggatttggggtgcagtattctgggggctctgctgttgaaaggagtcttgttcctgtgcctgtctggggtggttttgtggaggggggcggttttcgctccggtgggaggtccaaatctgtggagattggcgattgctttttttttttgagacggagtctcactctgtcaccaggctggagtacagtggtatgatctcggctcggctcagcctcctgagtagctggggttacaggcacgcgccaccacacccagctaattttttttttgtagagaggggggtttcatcatgttggccaggatggtctcgatctcctgacctcgtgatccacccgtctcggcctcccaaagtgctgggattacaggcgtcagccaccgcgcctggcctggcgattgcttttgtctgcagggggtcgttggggactctggctgctgcagggtcctgttgctttaagattgatggttgcggggacgtgactgctgtgagtgacagttgctaaggggttgggagtatttgttgcaggcaagttagggacacagacctccagctgttgtctgctggagtctgatcgctgtgtgtgggattgtagttagtgggtgagtgacagtcctctctcactgtaaatctctctccgtctctacctctttctctgtccctccacaccgtgctttcattcaaagatttgttgaggaatcattggaataattacggtgaggccagtgtctgactgcagcaggtttctggggggctctcagccctgctcagacggggagaggaggcaggacacccctcattttccccaccacctgtgatcagccctgggggtgggaatcactggctcacatgggccaaaagagctagatgtttgggtctcagagaccacaccccattctgaccttgttctcaaacttcaaggctgaggctgaggggcttggtgggtttggcaggactggcggtcttgggtgggtgcagggactctccctggcgaggggggaacagagagggttacaggcattgggagagaggaccagccatgcagatatctggcaggagcattccaggcagagggcacagccagcatgtgcaaaggccctgaggcaggacagtgcctggtgtgttgagggaagagcaaggaggcctgcgtgcctgaaacagaatgatcaagaggtagcaggatgatttggtgttacaaccaccacttccgagccgggagctcctgggcccaagcctctttggggtgcacatcttcctaacaggctcagctgcgggcacttcccctacagctggggttctccaccatgccctattgatatttggggccaggcagtcttttgtcttggggggctgcgttgtgcattgtaggatattcagcagcgtaaatatttagagaccagtaggggcacctggtctctacccaccaggggccagtagcacttcccaagtgaggataacaaaaaacattgacaactttcccctgggtttagaaccattgtcctaaagttggaagtggggccgagagtgggaggctgcctggggggactggggtgggagctgcacaggacaagtgaggatttctggtgtgaccttaagtgaacaagcttcattctcctcacctatcaaatcagagtctggggtgatgagaggattctattcattcattcattcattcattcattcattcaacaagtatttattaagcatctactatatgccagcccccacagtgaggatataccacgaggaagaaagacaggcagtggcgtcatgaaagaaagagagacgttagttgctgggcgcagtggctcatgcctgtatttccagctgttcaggaggctgaggtgggaggatcgtttgagcccaggaggtcgaggctgcagtgaggtatgattgcaccactgcactccagcctgggtgacagagcaagaccctctctctaaaaaaatttaaaggctggttgccgtggctcatgcctgtaatcccagaactttgggaggccaagctgggtggatcacctgaggtcaggatttcgagaccggcctggccaacatggtaaaaccctgtctctactaaaaatacaaaaaattagccaggtgtagtggtgtgtgcctgtgatcccagctactcgggaggctgaggcaggagaatcacttgcacctgagaaggcggagatggcagtgagccgagatcacaccagggcactccagcctgggtgacagagggagactccatctcaaaaaaaaaaaatttttttttaaaaagaaagagacattaatgaaataattacacagatacctgtaaaatcgcaacaatactaaacgctgagaagcagaagcacctgacttagtctggtaggtcggagagggcttcccagagaatatgtgatcagaggagggggatagaggaattaggggagaggaggaagagcgttgcaggcactggagctgcaggtgccgaggccctgcggtgactccgaatggtgggaaggccagtgtggctggagtagggtcaggatacgctccatctggatctcccaggccctgtgagtgggggaagagagtgcagtcttgatccgttaaaggttttaagcaggaaagtagcataatctgatatgcatggtaaaaagatccctccagcagatagtgtctgtgaagtgcttagcataggcagtgtaagggactcagaaatgagttggatgatgccaacgggtattttggggacccagaggtgtcacaggctccaattcgtgccctctgagtccccacggatgaagctctggcctgtttccaggagcccatggtatattctaggcttggggtgagggggtggaaaagaagaatttccctgttttgagcatagtttcggagatgggggaaggacggccacctctagggtggtggggggagggctccaagggccggaagacacttctttcagtgaactcctgggcccgtttcacagaagggagactgaggccctggggcctcatgagcacccagtcctgagctacaacaccggccactgccctgtgggaggtcccagaggagctgtgtcttggcatcaaaggcgcttttgggacctgctcacagttcaggccacatctcaggcttggcagggtaggccctgggctccggctgcccaggcaccaaacccacctgtgactagctgtgtgaccctaggcaagtcggtgcatctctctgggcctccgggggaaaaagagatgtggagtctcccaagggtgttgtgagaattaaacaacattgtttacattccttcattcaacaaacagttattaagcacctactgtgtgtcaggtgctgttttgggcactgtagacacagagggggaatggtccctgttctcgggggctggtgttctagcggcagagacatacaccaagcaaatacgaccatcggtaatgataaagtaaggaagttcatccacgttgtctcaaatggcaggattttccttgcttttcaaggctaagtagtattgaattgtgtatacatatcacatttccttccttccttctttccttctctccttccttccttcctcccctccctccctccttccttccttccttccctccttccttctctccttccctcttccctccctcccttacttttttttttttttaagatggagttttgctcttgttgcccaggttggagttcgatggtgcagtctcggctcactgcaagctccacctcccaggttcaagcgattctcctgcctcagcctcctgagtagctgggattacaggtgcccaccaccatgcctggttaatttttttgtatttttagtagagacagggtttcatcatgttggccaggctggtcttaaactcctgacctcagggtacctgcccgcctcagcctcccaaagtgctgggattacaggtgtgagccaccatacctgccctccttccttcctccctccctccctcctttcttgctttctttccctcccttttccttccttcctttcccttccctttctttcctccctccctctccctcccttccgtccccctccctcccttccttccccctccctcccttccttccccctccctcccttcctccttccttccttccttccttccctcccttccttcttcctttttcccttcccttttctctctctctctctttttttctttcctcctttctttttctctgtcacccaggctgcagtgcagtgatgcaatcatagctcactgcagcctcgacctcctgggttcaagcaatcctcccacctcagcctcccaagtagttggaactacaggcatgcaccaccacgcctggctagttttttgtattttttgtagagatgggtttcgcccaggcttataccatattttctttatcacttcatccatccgtggtcacttaaattgcttccatatctgtgctattgtgaatagtgcctggagtgccagtacctcttcatactgatttcaataagtgtatgagctgatgggtttgttaacgagcctggtttaatcattccacacagtacacatacatcaaagcctcacatcatactccacaaatatctgcaattattatttgtcaattaaaaataagaaaccagggcacagtggctcatgcctgtaatcccaacactttgggagtccgaggagggtggatcatttgaggtcaggagttcgagaccagcctggccaacatcgtgaaaccttgtttctactaaaaatacaaaaattagccaggcatggtggcgtgcgtctgtaatcccagctacccgggaggctgaggcaggagaatcgcttgaacccagaggttgcagcaagcagagatcgcgccactgtaatccagcctgggcgacagagtgagattctgtctcaaaacacaaacaaacaaaagatacagtaaaataggccaggcgaggtggttcacacctgtaatcccagtgctttgggaaactgaggaaggagggtccactgaggctaggaattggagagcagcctgggcaacgtagcaagacccagtctctacaaaataaaaataaaaaaaactggccaggtgtggtggcacatgcctgtagtcccggctacttggaaggctgagacaggaggattgcttgaacacaggagggtgaggctgcagtgagccatgattgcaccacaacactcaggcctgggtgacagagcaagactctgtcttaaaaaaaaaaaaaaaggtgaaaaagtaaaggaggggagcaaaagtgtctggaataagcagaataaggagagaaagtgagtgtgtaagtgtgtaagtatgtgagtgtgtgtgaatgtgtgggtggctgtttaggctgggggtcaggggaggcttgctgaggaggtgacattggaggagaaagacctaaaggaggtgagggaggagcgatgtgagtgtctggggaacagcattcctggcagagggaacagcctgtgcaaagaccctgaggcaggactgcattggggtgttggaggaacacggaggaggcccatgcggctggagtggagtgagtgagtgagtgtgggaggggatgttgcagttgtccagttacgtgaggagaagagtccaagagaggtggcaggtggaaggatcttagatgaagttttccttttcttcctttttttttttttttgagatggagtctttctctgttgccagtctggtgtgcagtgacacgatcttggctcactgcaacctccgcctcctgggttcaagcagttatcctgcctcagcctcctgagtagctgggattacaggcacccgccaccatgcccagctaatttttgcatttttagtagacatggggtttcactgtgttggccaggttggtcttcaactcctgacctcttgatccgtctgcctcccaaaatgctgggattacatgcatgagccaccgtgcctggcctaaatttttctttttctttttccttttttttttttaagagacagcgtctcactttgttgccagggctggtgtgcagtggtgagattatagcagactgcaaccttgacctcctgggctcaagcgatcctcacgcctcagcctcctaagtagctgggactacaggcatgtgtcaccatgcctgggttttgttttgttttgttttttgcttttttaagagatggggtcttgctatgttgctcaggctggttttgaactcctggccctaagtgatcctctagtcttggcctcccaaggtgctgggattacaggcatgatccactgtgcctggcctctatggcaatttttgaaggtgaagccagtagtttcctgagttgggctcagatttgggggtgagagaaaaagaggagcagaggacaaaagtaggggttttggcctgagcacttgcagggctggtggcagtgggggatggaactgccatgaactgaggtggggaaggtggagggggagctggtggtggggaggggtggaactgccatgaactgagatggggaaggtggaggggacgctggtggtggggaggggtggaactgccatgaactgagatggggaaggtggagggggcgctggtggtgaggcacatcacttgctgggttttggccacgttgagtatttgatgctcgcgggcgttgggaggtaaatgtcccacgaatgctgagtttggggtgaagccagctgggagtcacaatctcctgggctcagcgtagaattaacaaggtgtggtgtgtgtgtgtgtttgtgtgtgtgtgtgtgtgtgtgtgtgtgtgtgtgtgtgtgtgtgtgtgtatgtatgtgtgtttgttgtgggggggacttggtggcctgagtggggtccagccacctgctctgggggatgtagggactcaggtgcctcgaagagagaccctcctggctggcgttttagtgggagctggggcttggccttggatggacacgaggtgcctctgagcttccttcctttgaggctgtgtggtgactgaggccagtgccctgcagagagggaaaggcagaacctgaggggcccgttgggccagagactgtgggctccaagaccgagatgaattttgctgggagtgagtttaaggaagtgaatttccactgcacggcatccatgcataacagccctgacgtcacatcagaccccgtgagccctggtgagcctcccttggagctcgggtgtccaagaactgagtatctgttatgttggtgaacaatgtatgtaccgggttacctgttcagcctttgctgcaaacctgtgcccatttcacagttcaaagaactgaggctcaggaaagaggagtcacttgtccaagtgtgtctttggcagagcagggactgggtccttggcctcaccggctctggacacccctgcccaccccccacttcctgcccatcagcctgttcctggcactcgggaccccagatgggcttgtgggctgggcacgggagataccaacggcttccggtctcttcccctgaggctcaggaggtgccgggggagggggagggcgggccacggctcccagggtgccttgcattttccccttgaagactgagttcccacagaagcgtctcggttttagagatcggtttcgctgggggcttttatgaggcaggggctccatcagattgagagtgcagggccccgaggttccattgggttccctgaaccccgtggaaatgtggcccttccgagaaacctgggctgggctgcccagggccgtgggaatagcctctatgggtccctggttctccttgggcagacttttgagtcagaggaaagccagcttggggaggaaagcaatttcctcatctcaggccccccaagtctgggcaggaggggtggagaaggcagagagctggacctagagaagtagtctccaactccctgcttgcacaccccctgtgacgggcagctcattacctatcaaggcaaccttgcttggttagtgagctggaattcttacaaaatcctttcagatgctggttcaaaactgcaccttcatccctctctctgtggtccttacctagctttctggaccacacggagcacacccccttctccaaatatctcacactcttatatttattcgactgtctattcaggagatgtgtggacacaggggcagacccagagagattgctgcagcaatggtggaatcccactgggtcctgggaacctagaaggcgcttctggcctatctgagaggaatcaatttggtgggcttcctgtaggaggtagcatctaagctgtgtcttaaaggacaaatatgatttggcttagggaagaggtgagggaagaatgcttcaggcagaagaaacattatgtggaggtgagggaccattctttcatgaagtaaaaaatggtctacgtggctggagtggtgtgtttgaggagggctaagggggtactaaggccagaaaagggatagagaaaagcctggagcagtgacccaggtagcagaaaaacaataccctcattcttcaaacagggtatgagtccaaatttgttttgtatttcttaaacatttttttaagagagatggggtcttgctatgttgcccaggctggtctccagctcctggcttcaagtgatcctctcacctcagcctcccaaagtgctggaattacaggcatgagccttcatgcctgactcatttcacatttctcaattgctttgccaggaagcaaggtataccttctaggtacacaagtgcccatcttactgcatccttgctagcattaggttttattgtttttaagaaatctttgccaatttcggcaggaaaaattggtatctcatgtaaatgaaaacaaatgagtatttcccttgtaagcgacatgcctaaacaatttctccagacatgcattggcctggcaaatgctaccttttgcctgagtgttaagaaatcttacactcgctggagagtttgcagtcatttttagctcctctcttagagcaaaagaaaagcttgtgggctaccctctggccacatgggtggaggaatttgtgaggcagcctcctcccttctcctttgattcatctttctttttctcacctttttttttttgtccttttaaacttctctgtactctgttggcctctgagtcttctggtaactgtagcttcatcttcatctggggtgtctttgggctcaaaaaagagggttggcaaaccacaggaagactccccaagtcttcataggagactatgctgatatgctgagtatcttcttcttcttcttatttttgagacagggtgtcactcctatcatccaggtgggagtgcagtggtgccatcacagctcattgcaaccttgacctcctgggctcaagcaacctcctgcttcatttttttttttgatttttttgtagagacaaggtctcactatgttgcccaggctggtcttgaactcctaggctcaagcgatccacctgtctcagcctcccaaagtgtgagatgacaggtgtgcgccaccgtgcccagcctatgccaggtatcttatatcttatagacacatcttaccattttagttctcacaacatctgcctatgatgataaccttgaaccccttttatagatgaggagctgaggcttagagaggttaagtcactcagtcagtatcccatggccaatattggctatttctcttagtttcactcaataaattactcttatgacattaagattttattaaattctaatttaggagcagagggttggccatttatctttctctttctgtcaatctctctctccttttttgagacagaatctcactctgttgcccaggctagagtgcagtggtgtgatcacagctcactacagcctcgacctccccaggctcaggtgatcctcccacttcagcttcccaagtagctgggaccagaggtgcacaccaccatgcccggctaatttttgaaaacttttttttttttttttttgtagagacagggttttgccacattgcccgggttggtctcggactcctaagttcaactgttcctcctgcctcggcctcccaaagtgttggcattacaggtgtgagccacctcgctcggctgttggccatctctctctacccactgtcccaccctgccctgtcaggggatggaagccccattccttattagggagggactgtggagtccagttcagcaccagccttacaatgcaaggaaagaaaagaaaacaggaaagagggaggggaaaccacaaacaacccttagagagccacaagtggctccagggctcagttcctgagttagacctcggttttgggctgctaaattctaagctccaagctctagttccatctctgccactaaaaccccatatgaccttgataaattctttaccagctttgggtctcagtttttccttctacgagtcaacccatctcttggattttctgggaactacagtcatcccttgatatctgggggggattggttctggggtctcccttggatattaaaatccatggatactcaagtttctaatctaacatggtgtagtatttgcatataacctatgcatatcctcccaaatatttatttatttatatttttatttttttgagatggagtctcgctctgttgctcaggctgcagtgcagtggtgcgatctcggctcactgcaacctccgcctctcgggttcaagtgattctcctgcctcagcctcccaagtagctgggattacaggtgtccaccactacccggctaatttttgtatttttagtacagacgaggtttcaccatgttggccagtctggtctcgaactcctgacctcaagtgatcccccaacctcggcctcccaaagtactgggattataggcgtgagccacagtgccctgccctcccatatactttaaatcatctctacattacttatgataactaatacaatataaatgctatgtaaatagttgttatactatatatgtattttttattttatttttatttatttatttattttttgagacagagtcttgctctgtcacccaggctggagtgcagtgacagtggagacttacttcagcctccacctcccaggctcaagtgattctcatgcttcagcctctccagtagccgggattacaggcatgtgccaccgtacccagctaatttttgtatttttagtagagacagggtttcaccatgttggctaggctggtctccagctcctggcctcaagtgatctgcctgccttggcctcccaaagtgctgagattataggcctgagcgactgtgcccggcatatacatatataattttaaatttgcattatttttattgttgtcttgttatttttttcaaatactgtattttcaatctgtggttggttgaatccatggatatggaacccgaggatacagaggaatgatggtatacttttcatatctgagctctaactggttctttttatatctacatgtttttctttcataacctcctgttcttgtttgacagttgtcattccttcctttatctttctgagtcacctaacatattcattgtacagctctttcaagattaaactgatattctctatttcctcagatgtaatatcttctagttggggagtttgtgggaatttcttgaagtggccacagattcattatcttctttaggttatttctccttggtctgggccttctgcacgtgcatgcttttgaccttatatattaggggactctgcacttccatgcgtgggagacttttatccttgtcattgggcatctctgctttggtctctggttcaagttagcattttcccaccatttctcagtgtctgggaggaatggggaggttttggtgtgtatttggtctcgagtggatagtcaatttaccatctgtaaacagatacagttgtgttgggtgatgtccgaaggttctcagagacattttcaacacagatagtacagagtgtggccggagaagtccagtgggagaggattcttttattttttgagacagagtctcactctgtcacccagactggagtgcagtggtgcaatctcggctcactgcaacctccatctccaggctcaagtgattctcctgcctcagtctcccgagtagctgggactacaggcgtgcactaccatgcccggctaatttttgtattttttagtagagacagggtttcgccatgttggccaggctggtctcgaacttcccacttcaggtgatctgcccaccttggcctcccaaagtgctgggattacaagcatgaaccaccaagcctggccaagagaggattctaacaacaataaatgaaaaatagctatgtgggttatttattattatcaggtaccagctcttaacacatcttaccttatttattccttatacaaccaatgaggtaggtactgctattattccccttttgcagatgagacattggaagctcatagaggtgacctgacttgcccaggcacacttagctagggaggaaaatttgaacccagttaaagcaggtgttcttaatcctgcctatttcattgcatcctgacagcatggatactaatctcagccttgccgtattgttaactgtgtggtttcttgacccttttgttcctctgtggaaaccaacctctacccttcagaggtgctatgcaaactcaaaactgtgtcctcactgaaacaagtggaagtatctggggacatttaacctggtgcattaggaagggtttgggtactggatcccattgtacctggattctggctgtgcgacctcaggcaggtcacttgacctctcagagctttgctttcctgatctgtcaaatcaggatgatagccgtgctttactttcctctctgggtagtggtgagtgaaaagtgagatgttccatgtacctggcatacagtaggtgctcaatacacaagaattgttttccctggaggagagcaggctgttgtgggaatagggaaatgtcagtgtcaattcctcaaatccccaaagggttctagggtccagaggaaggggagattctccacggatgttaaggaaagaatgaattctagcagggatgggtccagcaaaggtggcttctagctctactccaggaaaactttttggaccatgagagctcacctaatctgacaggtgactttttttttttttttgaggcagggtctcactctgatgcccaggctggagtgcagtggtacatcacagctcactgcagccttgacttcctgggatcagatgattctcccacttcagcctcctgggtagctgggactacaggtagaaaccaccacacatggctaatttttgtattttttgtagagacatggtttcatcatgttgcccaggctggtcttgaactcctaggctcaagtgatccacctaccttggcctcccaaagtgttgggattatgggtgtgagccattgcacctggccccatattttttagaataaaccattaaacgtatgaatattttgggaatgaaccaataaatgcatgaatagttgaataaattaaagaatgagtgaaatgtgagtgagtgaatgaatgaatgagcagatgaaataatactcaaaaggcaggcgccatgagactggaatacagtctgattggatcctctctttcccaaaggggtggatgccggagaccttccagtgactaggagttcttgctgggttgggtgactatagaatcctgcaaggcttttactgtttgttttctgagctcagtcaagatttccagacatggccaggcgctctggctcatgcctgtaatcccagcactttgggaggctgaggcaggtggatcacctgaggtcagtagtttgagaccagcgtggccaacatggcaaaaccccgtctgtactaaaaatacaaaaattagtcaggcgtggtggcaagcatctgtaatcccagctactcgggaggctgaggcaggagaatggcttgaacctgggaggcggaggttgcagtgagctgagattgcaccactgcactccagcctgggtgacagagtgagactgtctcaaaaaaaaaaaaaaaaaaagatttccagacatgggaacctcttgaacacatgagcaggccacatggtgtggcagaacattctctctagtgactttagaggggatgagctccctgttacagaagaggaccaaacagagctttgatgtcactggtcaaggcagctgcggaggctgcttggctggggtggggctggcctgcgatggggccatctctgagagagacccttttcctgtttcttcatccccctccggccactgcaaggagtgctgcctgtctcgccaccctccgttagcacttcctctgcgaccacaggaaggcccagcccagctcttactgtgttttctttaaataaactcgggcagcagaactatctgctgccccatctccctctgggttcctgtggaggtgtagggggcggtggttaggggggttcaggccaagccacagacgggaaggactcagaccacagtgataacaaattttcctctatctcagtggtgtggcctgagagctgactgctcagagtcactctggcctgtcctttctttatgtgactaccagcccacactcacttctcttccttgggcattgctgattctggtgtggctcttggggacccctgggctgtgttcctcttcctttccagcccagctgtgttcatctcggagcttgcctaccacttctgtcttctctcctagagccaaggtggtactttctagatgctggccccagagctccgggatgtgccgtggacctctacacagatgttcatcaattcctgggctctggtcaacatccgttgaagttggaatggttgttgggaccccctctgatgtccccccaagacagggccaggaatgtggcaggggaattctgtggctagtgggggaccccaagtgagggcttgtctggggtcttgtctggggctcaggtgagctgtctgggcagtggaagacccaggcccagccctttgtggggagagaggacccattcaggctcactgcacctcactgttatgggttctgcccttttgagtattccttcatctgctcattcattcattcatttacccacgcttcactcaattttaatttattcaaatatccatgcatttattagttcattccaaaaagatattcatgcatttgttagttcattcaaaaaatccatgcatttattagttcattctaaaaaatagtcatgcatttattagttcattcaaaaaaatccatgcatttattagttcatgcaaaataatccaggcatttattagtttattcaaaaaaaatccatgcacttattagttcattcaaaaaaaatccatgcacttatttgttcattcaaaaaaaccacacatttattagttcattaaaaaaattcatgtgtttattagttcattccaaaaaatattcatgcatttatgagttaattcaaaataatccatgcatttgttagttcattcaaaaaatccatgcatttattagttcattcaaaaaaaatccatgcacttatttgttcattcaaaatccatacatttattagttcattaaaaaattcatgtgtttattagttcattccaaaaaatattcatgcatttattaattcaaaaaaatccatgcatttattagtttattcaaaaaaaatccatgcatttattagttcatgccaaaaatccatgcatttattagttcattcaaaaatattcaggcattcattcaaaaaatatttatgcattaaatagtttattttaaaaaatattcatatatttattagtttattccaataaatacttttacagggccttcctccttcattcctgatcctggggtggaggtgaattgaggaacatatgaacactggttttaggagtctaagatgcttatactttcataagcacaccccagaggcttttaagcaaaggataaatggaatttcaaaaagctacctctgggctcatggtgggtttgtgggggacaagggtggaggctggtgggggcccaggtgggatagaaaatgcttgggcggggaccagggctgtggggactggagagaggggtggatgcaactgtggaggagcgattagtgggaggtggcatgaatggggccaggggagaaggatttgaggggtgtcagtggcagctttggggccagagttggtggcggtactcacatgctaggagaagaatgctgcttacttttggaatctctgactgtccctgggtcagccacttaacttttcctgagcctcagttgcatggtctgtaagtggggatgatatgctcctgacagagggtatggtagccctaggtgtctataagggctcagtgaacttggacacctgagcaaggttatgttattagcctggctaccaggaacaaagctcagagacagctgcaggaaattgcaaacccagggcgtcccgtctggcacctgtggaccagggttcacctaactgcagctgcttccccagcccatgtgatgtgggcaggtgtggagccgcctaccactacagcaagtggcaacaggtggggaggtggtccagatgtctttcggcttcagagttggtcctggacttgggttctggagtctccccagtgaccaggatttctcagagggggtcccaggtatggacactgcagaccctcctgtgactaggagttcttagaggaggtcctgggcatgggcactggagtccctcccatgaatagaaattctcagaggagttcctgggcatgggcactggagtcccttctgtgactaggtggtcctgggcatgagtgctggagaccttccagtagctaggagttcttgttgacttgggcgactgcagaacaccacaaggcattgattgattgattgattgattgagatggagtcttgctctgtcgcccaggctggagtgcagtggcgcaatcttggctcactgcaacctccgcctcccgggttcaagtgattctcctgtctcagcctcctgaatagctgggactacaggtgcatgccctcatgcctggctaattttttgtatttttagtagagacagggtttcaccgtgttagccaggatggtcttgctgtcctgaccttgtgatccgcctgcctcggcctccaaaagtcctgggattacaggaatgagccaccgcgcttggccttattttttattctccaagcccaaccaagatttccagacatggtggcctcctgagcacatgagcagatcacatggtgtggcggagcagactcacacattagacagatttgagttcaaatcttagtcctgctgctgacttactgtgtgatgtgagcagatgaaagaccttctctagacatattttcttcttttattataatttcactcaacttttccatgagactgggagatttgtgaaggctgggaggcagtttgattttcttcttttgtctaccttacaacctggcacagtgaatgaatgaataaatatgcacctcaaattgttttgtgaagtatagtaagcatttcttgggcaaataaatttgagagcctctaagtcacaaaactaaacttttttttttttttttgcaggatttctcagagccttcaatgtactttgtgattctcctataaggaataaggtatgcaatatttctcaaacatttttgtattctttttctgagggcgcgtcatctttggcactggggttcctaggaacatactttgggaaatgtggacttaggatcattgtcagaggtccttggagtgttgctatttgtctggttgtatattcctttatcctctgtcaaacatgacctgaattatgtcacataaccatgtagcaacagaaactaaggtcaagggctgttagtgaagaataaaagactaaattagaatgttggggaagaaaaacctatactcccaatttaggaaagttactacggtttatcttaaaactcaacactgagtttctgccaaagtgaacagaaaaatgtggtgtctttcatggtttcttgggtgggagttcagcaagggggttaaatgctctccagctgtgaacaaggttgttttcattcatgtgttcattcattaagtcattaattcattcaacaagtgtttatttaccacctgctatttacaagcacaatgttaggtaccagggatacaagagtagaccaaaaaagacatacatatgcccttatggagatgacagtcatcggttttcagaacaaagatgatcggttttcagccctcagtgccccttctttcctgaagtttgttctgaatttttagacaggctccttccgccttgctgtggtttttctctccacctgttttgtatctgaatcacagaaggtgaagacatcccccaggtggttagtagaacccagatctttgtgttagagtcttcatgaaaaccagtgtgagaaactgggctgaggcaagggaggtagtcttccatccttgctatatctctgggacactgggcatcttttctgggctccaccctaggggttgggaatctaataactttgattttttttctctacccccaattaccaaccctctaattcttcaacactaggcacatgggaattgtgttttgttttcaaacctgggcaacaaagtgagaccatgttcctacagaaaatttaaaaatagctgagcataatggcatacaagtgtagtcccagctacttgggaagctgaggcatgatgattgcctgagcccaacagttcaaggctgcagtgaactatgatcccatcaatgcactccagcttgggtgacagtcagaccatgcctctaaaaaaattgcttttttgttggttggatgaatggatggacccatggatgaatatatagatgaatgaatggatttgtagaagagtgactgacacataggagggacatttggatgaatgaaagaatggaggaatagatggtggatggttgagatcagcaaatgaatatatggatgaaaagatgcctagtaaaggcacaatgtgatttaaaaaaaatgaatctctcagtgaatcaatggacggttggatgaatggatgagtgagtaagtggtagatgtgatggagagttgcacaatgaaatggggagatgggtttgagtgaatggatggtgagtgagtgaatgaatggataaatggatagatggtgagttgggtagagggatggacaaatggacagttgagtgaatgggtgagtgattggattacccgatgaatgggtgggtagttggatggatggaagggcaggtaaaaaattctggccacaaactgaagcgatcttggggtacaatctgggcacagtttaggtgaatagcagcttattttctgatcccaaattggctctgtttacctccatggatacatattctctatttctaggttcagtcatccttctgtctccctctgggtttccaagaatcttaccttggaactccaattgaactgagccctgggcttgtctgctgaccttctcaacagtaaggagaacacccctggaagagcatgtgtccttctgagggtacagggttgaaccagctcttcatgatgacggtggtctgctcttaagcctttctagcagtttcttgttttgtggcctcacccaatcttcactgggcatcaaacagatgaagatcgaaccttggtctccagctcagttccaactccacctgtcccctccatgggtgatggtggagacaaaggataaattagagaaaggggtcatccaggtccaccctttgccattactccaagaactctttcctttttcccaggttctccaagcagctatggatgtgggtttctcgggcctgccagatgtgtctcagagtcatagcaagaccttgtggggggctcggggcaggggcccctccatacgtcgccagcgggagttcatgccagaagaaaagaaggacacagtttactgggagaagcggaggaagaacaatgaagcagccaagagatccagggaaaagcgacgtctcaatgatgcagccattgagggcaggctggctgcactgatggaggagaatgccctgctcaagggtgagctgaaggcgctcaagcttcgctttggcctcctgcccctgactggtgggccccgggccttgcccctgcaggctctgctattggaagccccctggactggggacccccggcctggggctgaagcactctcatccttgtctggctctcacagctgcctcttaaggccacgttccctggatgctgggattccaggatgtcggggctgcctgctggctcccagatggactggcttggccacttctcctaggtccccccaagagtctgcatctcctaccctcaacagaattgacatggccttgcagactgccctcccacctgccctcttcagctgtcacctcttggaggggcatgtagggtccagaccagagctcagaccctgctgggggctgtggtcaccagtgccctctggatgccgggcttcagggccatcagatgtgttgctgacacccactgctgatcccatgggtctgtctcctggggtgacctgccctgccccagggaacagtcctgagggtctgggtcagccctctctgccccacaaactgcgcatcaagtcccgagcctcaggcagggtacctcgtggctgggagggtggtcaggcgcccctctgagggcttcctctgggaagggctaggcttgcaagggggtgtttgggggcggaatataggtttgtctgagggatgagtagcttggtcttgatcagcaatctgggaaggcctgtaggaagtaggggtgccctggcttggaaggtccacttcacagcttccataccagacctcctaggggtggagtggatgggagcccatcttggattctaccatggctcttgccttgccttaaaatctatgctttgggttgtcacttttccctcttccttcctcctttccatttatctattcttccctatagccatccattcatccattcatcctcatttattcatccattcattcattcatcaatccttatccatccatccattagtccctccatccttatccatctatccatccatccatccatccatccacccatctattcatccatccatcaatccatccatccattccatccatccatccatccatccatccatccatccctccatccattcatccacttgtccgtccatccatccatccatccatccatccatccatccatccgtccatctatccatccatccattcatccatccgtccatccattcagccatccatctgtccatttatccatcctccatttatccatgcatctattctcattcatccatgcatttgttcttccttctttctatctagccatccattctcattcatccatgcatttgtttttccttctatctatccatccatccattcattcatccacccatccacctatctatgcatgcatccatccatcctcatccactcatccacccatcctcacctatccatccatccacccattctttcttgcttctatccattttcccatccacacacctatccattcatccattcatacatcaatttattctccatccatccatccatcctcatccattcccattcatccatccatcctgtcttccttccttgcatccactcatcctcatccatttacccatccatccatccatcctcacccatccatctacacatccttcctttcatccacccattcatctactcatccacccatccatcctttcattcatttattcatttagccactcatttatgtgctaacttgtttattcattcattctcttactcattaatttacttataattcacttgtcccctcacccacccactcacgatctttagaccttccttttgtgcccagttagtgacaagtgagaagacacttttctggtcttgggtttcctgtcctggggtaggaatgggtgtttgggaagaaacatactgaagaccagactgaaggaggaggtaacgtctagggtgtctgaatcccccttcttggtgtcccctggggggcttgcttaccacccagtttgaggggcagacatattggcttcttctgtgtcttggatcaggccttgagctgctggaacaggagcagctgtgtgagggcatcagtgtcctctctctccctggctgccccctgcccctgagaaccaggtatacacccacccaggtggaagggtccattctgcagggaaggtcttccaggggcctggagcccaaggacttatcaaggctccctcctcctcagtttctcactcagcccctctcccattattattattattattattattattattattattacatcagggatcttgttagattctagataaaaatactcaaactccaatcatggggagagctcatgggatggggggctcatctggactggtactgacactgagaaccagatgcccctggccaactggatcacttggactcaggagcatcgcccacccccaccagatctgggggctgggctagttcttggctactccaagtttatcagagccacaaatgtgtgcagggtgaggacgtacaaagtgcctctctctcactagtacaacaggtgggcagtatcaccaaacaggccaagagctcccctgtgactgggcatccctagaatcctgcacatcacaggtaggacctcctctacttgctcagcctttggttctggtccagggcagggattgggcaagatcagcccttctccttccctccatgcctgaccttccagcaggtggcttttctcatgtcactgagcctcccttatacatctataaatgtttacctataaatgagcccattccctagaaatatattgtgaatattaaataagaggcagtaaataaattgcccggtataggggcttctctggactgttttatcttcataaataatgtgaatcctggagggcaaggtggctcatgcctgtaatcctagcactttgggaggccaaggcagatggatctcacttgaggtcaggagttcgagaccagcctggccaacatgatgaagccccgtctctagtaaaaatacaaaaattagccgggcatggtagcgagcgcctgtaatctcagctacttgggaggctgaggcatgaaaatcacttgaacccaggaggtggaggctgcagcgagctgagattgcaccactgcagtccagcctgggcgacagagcgagactccatctgaaaaaaaaaaaaaaaaaaaggaaaaagaaaaaatcctgtttccctttttgctttgcccaccaaggagctcagggccgagcttgtggctcagctataacagcattttcattcattcattcattcattcattcattttttaattcatttgcttatttagcaaattttcttgatcataagtttctcattgtttcattttattcaaggcatgttttgttgtaaaaagtctgaaaatcatatgcagccgagttggcagtcttttcttttgtggtttgtacatttttgtcatgtttaagacaacttccatgtctcaagatcataaagatagtctcctatctttatgttccaggtactggggaaagagaagtgaacacaatagatgtgattcctgcctctatggtactgataacccagggaaggagatagattaaaaaataagaaaaacatatagtaggatcaatgatgatacgtgtcatggagaaaaaagggaggcttgggaaaggtaggtgtgggtgcgttgtaataattgaaatagggagatcaggattgaaatagggggatctcagccttgctgagaaagtgacatttgaacagagacttgagagagatgaaggggggagtcatgcatgtatcagaggaagaacatttcctagtcagaaagaacagcctgtgcaaaggccctgaggtgggatagtgcctagtgttttgaggaagattgaggaggcccatgtggctggagtggagtgagtaagggggagagagggaggaggcgagggcagggaggtgatggaagcaggttgtggaggactttgtgggccaaggtgaggactttggcttcctttctgagtgatatgggcatgagggggacgtttccaagtatatttctgttgtagttctccccttacctccatcctgtgatgtgtgaggctgagtgaaaataaacccaccacataagtgcaggagagctggctcattgtctggggtggggataggtggggactgaccacagtgttgctgtgactcatgtccccctaaatggccacattctccctgcgctcagagccagggtgctcatcccatccctgcttctaaacttctctgagatatgacggacagggcaggtaaagctactccatgaggtggaatcatggaagaaaaacacagatggttcttttttttctttatgaagctgtcttccactaaataattatttttgacaagtgtgggagaaagggtaatcagatgcatgtgggggatgctggaagggcaaagggatggctgaggtgggagatgagtcagtgaggaagtggccaggaatagttctcaaggcattgcatggtaggtaaacaggaaggtaaacagctcaggcaaacaggaagagctggagataagttggagataaactggttactctggggaggaaggccatggaggggaaaggaagtaaaggcttcaacttgccctgcaaataccatgactcctgagggtctgtcacctatgacaagcagactcatttcttggctgcctagtctgggccagtggttgtgctggtgatttatcctagattttgtttgaccctctgaaaaagccttcattattatgatctccattaacagatggggaaactgtgactcagagcagttatgtatcttgcctaatattacttagttggtgactgggccacttcccgcctcatcactgcaccagtgtcattggctaactttctattccttgagattctttcctgcctcaggtctttgcatttgctttccctctgcctggaatttccctgagtctttaaatgactcttttttccatcttcaggtctcggttccaatgccacctcctcagaaaggccctccctgtacatccagtctaaataagagccccagttatttgtgttgagcatgtacccatagtaggtgttcaataaatacttgttgaacaaatcaatgaagtgaataggttcagatgagcctcttagtaaaagcttccattgtagctcttacttaattcaagagttagatcctgtgtcaccaggttttatgatctggaggatgaggatggggattcttctgttgcattcacccaaaaagcttttgtatttgggacagagcctgtcatgcaagtgtgtgagaaatattgttgaattgaatctgaggtttgataaggaaacaggagccatgttatggggcagagggagacaaagaaggagggtgtcacgtaagtctttccttcattcattcactcactcatctgtccactcattcactcactcatttattcttgcactcatccactcactcattcacttactcatcattcattgattcactcactaatttattcattcagccactcatccattcacccactcattcattcactcattcatccattcacccactcattcactcacccactaattcaatcccttcctcccttactcattcattcatgcactcatgtattcattcatgcactccagtccctcactcattcatccactcactcacgaattcattcattcatccactcactcactaattcattcatccactcactcacgaattcattcattcatccactcactcactaattcattcattcattcactcactaatttgttcactctctcattcactcactcactcattcacacattcactcactcatccacccatccatccatgcgttcatgcacccatccatccatgcatgcgtgcatgcattcatccatccatccatttatttattcacccacaaccttccagaaacaatgaaatctattccttttggaatagatttcaaagggtggcccttacagaacctgccctttgataagaagatggacaaccttcaggtgaacaaatagacaatcagtactgtgtcagatgctactgagggctgtgagcttatggctggggcattcggggactgggcaggtcagggaaggtccctctgaggaggtgacatttgaaccaagacctagaaaaccttagtaagtgaaagaagccagccacaaaaggacatatgttgtctgacttcatttgtgtgaaatatttgaaacatgattcttagagacaataagcagattggtggttgccaggggctgggggagaggtgggaatgggagtgactgctaatggggatgggatttctttgaggatgatgaaaatgttttggctggaggcactcactgcacaccattgtggcaggcgagaattctaccactgaaccactgatgcctgactgcacaccattgtgaaggcactaaaggccacattggattggacactttaaaatgattaattttatgttatgtaaatttcacctcaattaaaaaaatgctaatgaggccgggtgcggtggctcacgcctataatcccagcactttgagaggctgaggtgggtggatcacttgaggccaggagttcgagaccatcctggctgacgtgatgaaaccctgtctctactaaaaatacaaaaattagctgggcgtggtggtgggtgcctgtaatcccagctacttgggaggctgagacttgagaatcacttgaacccaggaggcggaggttgcagtgagccaagatcgtgccgctgcactccagcctgggtgacagagcaagactatgtttaaaaaaaaaaaaaaaaagctagtgagtctgccatgcccagaggaaggcctgcacctgagatcaaaagggacagagagatcagggaacagggcgcagagtatgaggatatgggaggagaatcaccccttgttggcccccacttggaaatgggggcgtgggagccctgccagccctggctttgtgggtatgccagggtgacagggtgtgaagcgcctggacctgcctgggtagggaagtaactcacatgcacacacactcccgc
